(19) United States
(12) Patent Application Publication
(10) Pub. No.: US 2010/0196366 A1
(43) Pub. Date: Aug. 5, 2010

(54) Gefitnib Sensitivity-Related Gene Expression and Products and Methods Related Thereto

(76) Inventors: Paul A. Bunn, Evergreen, CO (US); Christopher D. Coldren, Denver, CO (US); Wilbur A. Franklin, Denver, CO (US); Mark W. Geraci, Aurora, CO (US); Barbara A. Helfrich, Lakewood, CO (US); Fred R. Hirsch, Denver, CO (US); Razvan Lapadat, Denver, CO (US); Michio Sugita, Centennial, CO (US); Samir E. Witta, Greenwood Village, CO (US)

Correspondence Address: SHERIDAN ROSS PC, 1560 BROADWAY, SUITE 1200, DENVER, CO, 80202, US

(21) Appl. No.: 12/670,052

(22) PCT Filed: Jul. 23, 2008
(86) PCT No.: PCT/US08/70930

§ 371 Date: Apr. 21, 2010

(30) Foreign Application Priority Data
Jul. 23, 2007 (US) 11/781946

(51) Int. Cl. A61K 39/395; C12Q 1/68; A61K 31/5377; A61K 31/517; A61K 31/497

(52) U.S. Cl. 424/133.1; 435/6; 514/234.5; 514/266.4; 514/252.18; 424/141.1

(57) ABSTRACT

Disclosed is the identification, provision and use of a panel of biomarkers that predict sensitivity or resistance to EGFR inhibitors, and products and processes related thereto. In one embodiment, a method is described for selecting a cancer patient who is predicted to benefit from therapeutic administration of an EGFR inhibitor, an agonist thereof, or a drug having substantially similar biological activity as EGFR inhibitor. Also described is a method to identify molecules that interact with the EGFR pathway to allow or enhance responsiveness to EGFR inhibitors, as well as a plurality of polynucleotides or antibodies for detection of the expression of genes that are indicative of sensitivity or resistance to EGFR inhibitors, an agonist thereof, or a drug having substantially similar biological activity as EGFR inhibitors. A method to identify a compound with the potential to enhance the efficacy of EGFR inhibitors is also described.

### CROSS-REFERENCE

[0001] This application is a continuation-in-part application of U.S. application Ser. No. 11/781,946, filed on Jul. 23, 2007, which is a continuation in part of U.S. application Ser. No. 10/587,052, filed Jul. 24, 2006, to which application we claim priority under 35 USC §120, which claimed priority to PCT/US2005/002325, filed Jan. 24, 2005, which claimed priority to U.S. Provisional Application No. 60/538,682, filed Jan. 23, 2004. Each of these applications are incorporated herein by reference in their entirety.

### FIELD OF THE INVENTION

[0002] This invention generally relates to methods to screen for patients that are predicted to benefit from therapeutic administration of gefitinib, as well as methods to identify compounds that interact with the epidermal growth factor receptor (EGFR) pathway to allow or enhance responsiveness to EGFR inhibitors, and products and methods related thereto.

### BACKGROUND OF THE INVENTION

[0003] Lung Cancer is the leading cause of death from cancer worldwide. Chemotherapy is the mainstay of treatment for lung cancer. However, less than a third of patients with advanced stages of non-small cell lung cancer (NSCLC) respond to the best two chemotherapy drug combinations. Therefore, novel agents that target cancer specific biological pathways are needed.

[0004] The epidermal growth factor receptor (EGFR) is one of the most appealing targets for novel therapies for cancer. EGFR plays a major role in transmitting stimuli that lead to proliferation, growth and survival of various cancer types, including, but not limited to, NSCLC. Ligand binding to the EGFR receptor leads to homo- or heterodimerization of EGFR with other ErbB receptors. EGFR is overexpressed in a large proportion of invasive NSCLC and in premalignant bronchial lesions/Bronchioloalveolar carcinoma/(BAC), a subtype of non-small cell lung cancer, represents the major form of lung cancer in non-smoking females and is rising in frequency, and epidermal growth factor receptor (EGFR) is expressed with high frequency in BAC. Unfortunately, the response of BACs to conventional chemotherapy is poor. Activation of EGFR leads to simultaneous activation of several signaling cascades including the MAPK pathway, the protein kinase C (PKC) pathway and the PI(3)K-activated AKT pathway (FIG. 1). EGFR signaling translated in the nucleus leads to cancer cell proliferation and survival.

[0005] Targeted therapy against the EGFR receptor has produced response rates of 25-30% as first line treatment and 11-20% in 2nd and 3rd line settings (e.g., chemo-refractory advanced stage NSCLC). For example, in phase II clinical trials, 11-20% of patients with chemo-refractory advanced stage NSCLC responded to treatment with the EGFR tyrosine kinase inhibitor gefitinib (commercially available as Iressa®, ZD1839). A trial evaluating the activity of the EGFR inhibitor, erlotinib (Tarceva®, OSI-774) has been completed and the results will be reported in the near future. A retrospective analysis of 140 patients responding to treatment with gefitinib revealed that the presence of BAC features (p=0.005) and being a never smoker (p=0.007) were the only independent 5 predictors of response to gefitinib. These data suggest that EGFR inhibitor therapy is more active in BAC and in non-smokers.

[0006] However, currently, there are no selection criteria for determining which NSCLC patients will benefit from treatment with EGFR inhibitors such as gefitinib. Moreover, EGFR expression does not predict gefitinib sensitivity. Therefore, despite the correlation of tumor histology and smoking history with gefitinib response, it is of great importance to identify molecular molecules that influence gefitinib responsiveness, and to develop adjuvant treatments that enhance the response. To accomplish this goal, there is a need in the art to define critical aspects of EGFR signaling and to identify which molecules interact with the EGFR pathway to dictate responsiveness to EGFR inhibitors.

### SUMMARY OF THE INVENTION

[0007] One embodiment of the present invention relates to a method to select a cancer patient who is predicted to benefit from therapeutic administration of an EGFR inhibitor, an agonist thereof, or a drug having substantially similar biological activity as EGFR inhibitor. The method includes the steps of: (a) providing a sample of tumor cells from a patient to be tested; (b) detecting in the sample the expression of one or more genes chosen from a panel of genes whose expression has been correlated with sensitivity or resistance to an EGFR inhibitor; (c) comparing the level of expression of the gene or genes detected in the patient sample to a level of expression of the gene or genes that has been correlated with sensitivity or resistance to the EGFR inhibitor; and (d) selecting the patient as being predicted to benefit from therapeutic administration of the EGFR inhibitor, if the expression of the gene or genes in the patient's tumor cells is statistically more similar to the expression levels of the gene or genes that has been correlated with sensitivity to the EGFR inhibitor than to resistance to the EGFR inhibitor.

[0008] In one aspect, the panel of genes in (b) is identified by a method comprising: (a) providing a sample of cells that are sensitive or resistant to treatment with the EGFR inhibitor; (b) detecting the expression of at least one gene in the EGFR inhibitor-sensitive cells as compared to the level of expression of the gene or genes in the EGFR inhibitor-resistant cells; and (c) identifying a gene or genes having a level of expression in EGFR inhibitor-sensitive cells that is statistically significantly different than the level of expression of the gene or genes in EGFR inhibitor-resistant cells, as potentially being a molecule that interacts with the EGFR pathway to allow or enhance responsiveness to EGFR inhibitors.

[0009] In another aspect, the EGFR inhibitor is gefitinib. In this aspect, step (b) can include, in one embodiment, detecting in the sample the expression of one or more genes chosen from a gene comprising, or expressing a transcript comprising, a nucleic acid sequence selected from the group consisting of SEQ ID NOs: 1-197. Step (c) comprises comparing the level of expression of the gene or genes detected in the patient sample to a level of expression of the gene or genes that has been correlated with sensitivity or resistance to gefitinib. Step (d) comprises selecting the patient as being predicted to benefit from therapeutic administration of gefitinib, an agonist thereof, or a drug having substantially similar biological activity as gefitinib, if the expression of the gene or genes in the patient's tumor cells is statistically more similar to the expression levels of the gene or genes that has been correlated with sensitivity to gefitinib than to resistance to gefitinib.

[0010] In any of the embodiments above, the method can include detecting expression of at least two genes in (b), at least three genes in (b), at least four genes in (b), at least five genes in (b), at least 10 genes in (b), at least 25 genes in (b), at least 50 genes from in (b), at least 100 genes in (b), at least 150 genes in (b), or up to all of the genes in the panel of genes.

[0011] In one aspect of this method, expression of the gene or genes is detected by measuring amounts of transcripts of the gene in the tumor cells. In another aspect, expression of the gene or genes is detected by detecting hybridization of at least a portion of the gene or a transcript thereof to a nucleic acid molecule comprising a portion of the gene or a transcript thereof in a nucleic acid array. In another aspect, expression of the gene is detected by detecting the production of a protein encoded by the gene. In yet another aspect, the method includes detecting expression of at least one gene selected from the group consisting of: E-cadherin (represented by SEQ ID NO:3) and ErbB3 (represented by SEQ ID NO:15 or SEQ ID NO:133). For example, the method can include detecting expression of at least one gene selected from the group consisting of ZEB1 and SIP1.

[0012] In one aspect of this method, the method includes comparing the expression of the gene or genes to expression of the gene or genes in a cell from a non-cancerous cell of the same type. In another aspect, the method includes comparing the expression of the gene or genes to expression of the gene or genes in an autologous, non-cancerous cell from the 5 patient. In another aspect, the method includes comparing the expression of the gene or genes to expression of the gene or genes in a control cell that is resistant to the EGFR inhibitor. In yet another aspect, the method includes comparing the expression of the gene or genes to expression of the gene or genes in a control cell that is sensitive to the EGFR inhibitor. In another aspect, control expression levels of the gene or genes that has been correlated with sensitivity and/or resistance to the EGFR inhibitor has been predetermined.

[0013] Yet another embodiment of the present invention relates to a method to identify molecules that interact with the EGFR pathway to allow or enhance responsiveness to EGFR inhibitors. The method includes the steps of: (a) providing a sample of cells that are sensitive or resistant to treatment with gefitinib; (b) detecting the expression of at least one gene in the gefitinib-sensitive cells as compared to the level of expression of the gene or genes in the gefitinib-resistant cells; and (c) identifying a gene or genes having a level of expression in gefitinib-sensitive cells that is statistically significantly different than the level of expression of the gene or genes in gefitinib-resistant cells, as potentially being a molecule that interacts with the EGFR pathway to allow or enhance responsiveness to EGFR inhibitors.

[0014] Another embodiment of the present invention relates to a plurality of polynucleotides for the detection of the expression of genes that are indicative of sensitivity or resistance to gefitinib, an agonist thereof, or a drug having substantially similar biological activity as gefitinib. The plurality of polynucleotides consists of at least two polynucleotides, wherein each polynucleotide is at least 5 nucleotides in length, and wherein each polynucleotide is complementary to an RNA transcript, or nucleotide derived therefrom, of a gene that is regulated differently in gefitinib-sensitive tumor cells as compared to gefitinib-resistant cells. In one aspect, each polynucleotide is complementary to an RNA transcript, or a polynucleotide derived therefrom, of a gene comprising, or expressing a transcript comprising, a nucleic acid sequence selected from the group consisting of SEQ ID NOs: 1-197. In another aspect, the plurality of polynucleotides comprises polynucleotides that are complementary to an RNA transcript, or a nucleotide derived therefrom, of at least two genes comprising, or expressing a transcript comprising, a nucleic acid sequence selected from the group consisting of SEQ ID NOs: 1-197. In another aspect, the plurality of polynucleotides comprises polynucleotides that are complementary to an RNA transcript, or a nucleotide derived 5 therefrom, of at least five genes, at least 10 genes, at least 25 genes, at least 50 genes, at least 100 genes, at least 150 genes, or up to all of the genes, comprising, or expressing a transcript comprising, a nucleic acid sequence selected from the group consisting of SEQ ID NOs: 1-197. In one aspect, the polynucleotide probes are immobilized on a substrate. In another aspect, the polynucleotide probes are hybridizable array elements in a microarray. In yet another aspect, the polynucleotide probes are conjugated to detectable markers.

[0015] Yet another embodiment of the present invention relates to a plurality of antibodies, antigen binding fragments thereof, or antigen binding peptides, for the detection of the expression of genes that are indicative of sensitivity or resistance to gefitinib, an agonist thereof, or a drug having substantially similar biological activity as gefitinib. The plurality of antibodies, antigen binding fragments thereof, or antigen binding peptides consists of at least two antibodies, antigen binding fragments thereof, or antigen binding peptides, each of which selectively binds to a protein encoded by a gene comprising, or expressing a transcript comprising, a nucleic acid sequence selected from the group consisting of SEQ ID NOs: 1-197.

[0016] Another embodiment of the present invention relates to a method to identify a compound with the potential to enhance the efficacy of EGFR inhibitors. The method includes the steps of: (a) contacting a test compound with a cell that expresses at least one gene, wherein said gene is selected from any one of the genes comprising, or expressing a transcript comprising, a nucleic acid sequence selected from the group consisting of SEQ ID NOs: 1-197; (b) identifying compounds selected from the group consisting of: (i) compounds that increase the expression or activity of the gene or genes in (a), or the proteins encoded thereby, that are correlated with sensitivity to gefitinib; and (ii) compounds that decrease the expression or activity of genes in (a), or the proteins encoded thereby, that are correlated with resistance to gefitinib. The compounds are identified as having the potential to enhance the efficacy of EGFR inhibitors. In one aspect of this embodiment, the cell expresses a gene encoding E-cadherin or ErbB3, and wherein step (b) comprises identifying compounds that increase the expression or activity of E-cadherin or ErbB3 or the gene encoding E-cadherin or ErbB3. In another aspect of this embodiment, the cell expresses a gene encoding ZEB1 and SIP1, wherein step (b) comprises identifying compounds that decrease the expression or activity ZEB1 or SIP1 or the gene encoding ZEB1 or SIP1.

[0017] Another embodiment of the present invention relates to a method to treat a patient with a cancer, comprising administering to the patient a therapeutic composition comprising a compound identified by the method described above.

[0018] Yet another embodiment of the present invention relates to a method to treat a patient with a cancer, comprising administering to the patient a therapeutic composition comprising a compound that upregulates the expression or activity of E-cadherin or ErbB3 or the gene encoding E-cadherin or ErbB3 in the tumor cells of the patient. Another embodiment of the present invention relates to a method to treat a patient with a cancer, comprising administering to the patient a therapeutic composition comprising a compound that downregulates the expression of ZEB1 or SIP1 or the gene encoding ZEB1 or SIP1 in the tumor cells of the patient.

[0019] Provided herein is a diagnostic method including the steps of providing a sample of cancer cells of epithelial origin from a patient to be tested, detecting the expression of at least one gene chosen from a panel of genes whose expression has been correlated with sensitivity or resistance to an antibody that binds EGFR, and comparing the level of expression of a gene detected in the patient sample to a level of expression a gene that has been correlated with sensitivity or resistance to the antibody that binds EGFR. In some embodiments, the gene or genes are chosen from E-cadherin, RAB25, integrin beta 6 (ITGB6), vimentin, ZEB1 and SIP1. In on embodiment, the gene is E-cadherin. In another embodiment, the gene is RAB25. In yet another embodiment, the gene is integrin beta 6. In still another embodiment, the gene is vimentin. In yet another embodiment, the gene is ZEB1. In another embodiment the gene is SIP1.

[0020] Also provided herein, including any of the aforementioned embodiments, are diagnostic methods including the steps of providing a sample of cancer cells of epithelial origin from a patient to be tested, detecting the expression of at least one gene chosen from a panel of genes whose expression has been correlated with sensitivity or resistance to an antibody that binds EGFR, and comparing the level of expression of a gene detected in the patient sample to a level of expression a gene that has been correlated with sensitivity or resistance to the antibody that binds EGFR, and where the antibody is cetuximab, panitumumab, nimotuzumab, or matuzumab. In one embodiment, the antibody is cetuximab. In yet another embodiment, the antibody is Panitumamab. In another embodiment, the antibody is nimotuzumab. In yet another embodiment, the antibody is matuzumab.

[0021] Provided herein, including any of the aforementioned embodiments, are diagnostic methods including the steps of providing a sample of cancer cells of epithelial origin from a patient to be tested, detecting the expression of at least one gene chosen from a panel of genes whose expression has been correlated with sensitivity or resistance to an antibody that binds EGFR, and comparing the level of expression of a gene detected in the patient sample to a level of expression a gene that has been correlated with sensitivity or resistance to the antibody that binds EGFR, where the cancer cells are selected from breast cancer cells, skin cancer cells, bladder cancer cells, colon cancer cells, prostate cancer cells, uterine cancer cells, cervical cancer cells, ovarian cancer cells, esophageal cancer cells, stomach cancer cells, gastrointestinal cancer cells, pancreatic cancer cells, laryngeal cancer cells, and lung cancer cells. In one embodiment, the cancer cells are from pancreatic cancer cells. In another embodiment, the cancer cells are from head and neck cancer cells. In yet another embodiment, the cancer cells are from breast cancer cells. In another embodiment, the cancer cells are from colon cancer cells.

[0022] Provided herein is a diagnostic method including the steps of providing a sample of cancer cells of epithelial origin from a patient to be tested, detecting the expression of at least one gene chosen from a panel of genes whose expression has been correlated with sensitivity or resistance to an antibody that binds EGFR, and comparing the level of expression of a gene detected in the patient sample to a level of expression a gene that has been correlated with sensitivity or resistance to the antibody that binds EGFR, and further selecting the patient as being predicted to benefit from therapeutic administration of the antibody that binds EGFR. In one embodiment, the expression of at least one gene in the patient's cancer cells is statistically more similar to the expression levels of at least one gene that has been correlated with sensitivity to the antibody that binds EGFR than to resistance to the antibody that binds EGFR. In another embodiment, the expression of at least one gene in the patient's cancer cells is statistically more similar to the expression levels of at least one gene that has been correlated with resistance to the antibody that binds EGFR than to resistance to the antibody that binds EGFR. In additional embodiments, the panel of genes in is identified by providing a sample of cells that are sensitive or resistant to treatment with the antibody that binds EGFR, detecting the expression of at least one gene in the antibody-sensitive cells as compared to the level of expression of the gene or genes in the antibody-resistant cells, and identifying a gene or genes having a level of expression in the antibody-sensitive cells that is statistically significantly different than the level of expression of the gene or genes in the antibody-resistant cells. In still further embodiments, expression of the gene(s) is detected by measuring amounts of transcripts of the gene in the tumor cells, detecting hybridization of at least a portion of the gene or a transcript thereof to a nucleic acid molecule comprising a portion of the gene or a transcript thereof in a nucleic acid array, and/or detecting the production of a protein encoded by the gene.

[0023] Also provided herein is a method of detecting sensitivity of an epithelial-origin cancer to an antibody the binds EGFR by detecting in a sample of tumor cells from a patient to be tested, the expression of one or more genes selected from the group consisting of E-cadherin, RAB25, TCF8, integrin beta 6 (ITGB6), vimentin, ZEB1 and SIP1, comparing the level of expression of the one or more genes detected in the patient sample to a gene expression level of E-cadherin, RAB25, integrin beta 6 (ITGB6), vimentin, ZEB1 or SIP1 that has been correlated with sensitivity or resistance to an antibody that binds EGFR, and identifying the expression level of the one or more genes detected in the patient sample that are statistically more similar to the expression level of E-cadherin, RAB25, integrin beta 6 (ITGB6), vimentin, ZEB1 or SIP1 that has been correlated with sensitivity than to the expression levels that have been correlated with resistance. In one embodiment, the gene is E-cadherin. In another embodiment, the gene is RAB25. In yet another embodiment, the gene is integrin beta 6 (ITGB6). In still another embodiment, the gene is vimentin. In another embodiment, the gene is ZEB1. In another embodiment, the gene is SIP1. In still further embodiments, including any of the aforemention embodiments, the antibody is cetuximab, panitumumab, nimotuzumab, or matuzumab. In still further embodiments, the cancer is breast cancer, skin cancer, bladder cancer, colon cancer, gastro-intestinal cancer, prostate cancer, uterine cancer, cervical cancer, ovarian cancer, esophageal cancer, stomach cancer, laryngeal cancer, or lung cancer. In yet another embodiment, the cancer is breast cancer. In another embodiment, the cancer is colon cancer. In another embodiment, the cancer is pancreatic cancer. In another embodiment, the cancer is a head and neck cancer.

[0024] Also provided herein are kits including reagents for the detection of expression levels that have been correlated with sensitivity or resistance to an EGFR inhibitor of one or more genes such as E-cadherin, RAB25, integrin beta 6, vimentin, ZEB1 and SIP1 in a sample of cancer cells. In some embodiments, the kits also include a compilation having E-cadherin, RAB25, integrin beta 6, vimentin, ZEB1 or SIP1 expression levels that have been correlated with sensitivity or resistance to an EGFR inhibitor. In one embodiment, the gene is E-cadherin. In one embodiment, the gene is ZEB1. In one embodiment, the gene is SIP1. In one embodiment, the gene is RAB25. In yet another embodiment, the gene is integrin beta 6. In another embodiment, the gene is vimentin.

[0025] Provided herein are methods of treating cancer in a patient by detecting the expression levels of one or more genes selected from E-cadherin, RAB25, integrin beta 6, vimentin, ZEB1 and SIP1 and administering an EGFR inhibitor. In one embodiment, the gene is E-cadherin. In one embodiment, the gene is ZEB1. In one embodiment, the gene is SIP1. In one embodiment, the gene is RAB25. In yet another embodiment, the gene is integrin beta 6. In another embodiment, the gene is vimentin. In additional embodiments, the EGFR inhibitor is selected from gefitinib, erlotinib, imatinib, lapatinib, and semazinib. In one embodiment, the EGFR inhibitor is gefitinib. In another embodiment, the EGFR inhibitor is erlotinib. In one embodiment, the EGFR inhibitor is imatinib. In one embodiment, the EGFR inhibitor is lapatinib. In one embodiment, the EGFR inhibitor is semazinib. In still further embodiments, the EGFR inhibitor is selected from cetuximab, panitumumab, nimotuzumab, and metuzumab. In one embodiment, the EGFR inhibitor is cetuximab. In another embodiment, the EGFR inhibitor is panitumumab. In yet another embodiment, the EGFR inhibitor is nimotuzumab. In one embodiment, the EGFR inhibitor is metuzumab.

[0026] Also provided herein are methods of treating cancer via upregulating E-cadherin in a cancer cell by administering to the patient at least one ZEB1 inhibitor and administering to the patient and EGFR inhibitor.

[0027] Further provided herein are methods of treating cancer in a patient via upregulating E-cadherin in a cancer cell by administering to the patient at least one SIP1 inhibitor and administering to the patient and EGFR inhibitor.

### INCORPORATION BY REFERENCE

[0028] All publications and patent applications mentioned in this specification are herein incorporated by reference to the same extent as if each individual publication or patent application was specifically and individually indicated to be incorporated by reference.

### BRIEF DESCRIPTION OF THE FIGURES OF THE INVENTION

[0029] The novel features of the invention are set forth with particularity in the appended claims. A better understanding of the features and advantages of the present invention will be obtained by reference to the following detailed description that sets forth illustrative embodiments, in which the principles of the invention are utilized, and the accompanying drawings of which:

[0030] FIG. 1 is a schematic diagram showing the activation of signaling cascades from EGFR.

[0031] FIG. 2 is a schematic diagram showing E-cadherin regulation.

[0032] FIG. 3 is a digital image showing the expression of EGFR and phosphorylated EGFR in NSCLC cell lines.

[0033] FIG. 4 is a digital image showing that ZD1839 downregulates pEGFR in sensitive NSCLC cell lines.

[0034] FIG. 5 is a line graph showing the effects of gefitinib on A549 NSCLC xenografts.

[0035] FIG. 6 is a bar graph showing the expression of E-cadherin in NSCLC cell lines using GeneSpring analysis of microarrays.

[0036] FIG. 7 is a digital image showing Western blot analysis of E-cadherin expression in NSCLC cell lines.

[0037] FIG. 8 is a bar graph showing real time RT-PCR analysis of ZEB1 and SIP1 expression in NSCLC cell lines.

[0038] FIG. 9 is a schematic drawing showing the use of siRNA to silence the E-cadherin transcriptional repressors, SIP1 and ZEB1 to determine the effect on NSCLC cell line responses to ZD1839.

### DETAILED DESCRIPTION OF THE INVENTION

[0039] While preferred embodiments of the present invention have been shown and described herein, it will be obvious to those skilled in the art that such embodiments are provided by way of example only. Numerous variations, changes, and substitutions will now occur to those skilled in the art without departing from the invention. It should be understood that various alternatives to the embodiments of the invention described herein may be employed in practicing the invention. It is intended that the following claims define the scope of the invention and that methods and structures within the scope of these claims and their equivalents be covered thereby.

[0040] The present invention generally relates to the identification, provision and use of a panel of biomarkers that predict sensitivity or resistance to gefitinib and other EGFR inhibitors, and products and processes related thereto. Specifically, the present inventors have used various cancer cell lines, including NSCLC cell lines, with varying sensitivity to the EGFR inhibitor, gefitinib, to define the novel panel of biomarkers as described herein. In order to identify a marker panel that could be used for selection of patients, including but not limited to NSCLC patients, who will respond to gefitinib treatment, the inventors undertook preclinical in vitro studies using various cell lines, including NSCLC cell lines. Based on the therapeutic response to gefitinib by using the IC₅₀ definition (i.e., the concentration of agent needed to kill 50% of the tumor cells in a cell culture), the present inventors have classified the cell lines as sensitive (IC₅₀<1 μM), resistant (IC₅₀>10 μM), or having intermediate sensitivity (1 μM<IC₅₀<10 μM) to gefitinib. The cell lines were characterized by gene microarray analysis (Affymetrix™ microarray Human Genome U133 set, 39,000 genes). By comparing the gene microarray results from sensitive and resistant cell lines, the inventors have identified a panel of genes that can discriminate between sensitive and resistant cell lines. These biomarkers (i.e., the genes identified) will be of great clinical significance in selecting patients/human tumors (including NSCLC patients) which will respond to this agent. The biomarkers identified by the present invention, and their expression levels in gefitinib sensitive and resistant cells, are listed in Table 1, and the nucleotide sequences representing such biomarkers are represented herein by SEQ ID NOs: 1-197. The nucleic acid sequences represented by SEQ ID NOs: 1-197 include transcripts or nucleotides derived therefrom (e.g., cDNA) expressed by the gene biomarkers in Table 1. It is to be understood that the present invention expressly covers additional genes that can be elucidated using substantially the same techniques used to identify the genes in Table 1 and that any of such additional genes can be used in the methods and products described herein for the genes and probe sets in Table 1. Any reference to database Accession numbers or other information regarding the genes and probe sets in Table 1 is hereby incorporated by reference in its entirety. For each biomarker listed in Table 1, the following information is provided: (1) the probe set ID number given by Affymetrix™ for the set of features on the array representing the indicated gene; (2) the parametric p-value, indicating the statistical significance of that individual gene expression difference; (3) the mean intensity of expression of each gene in a gefitinib-sensitive and a gefitinib-resistant cell line; (4) the HUGO-approved symbol for the gene, where one exists; (5) the sequence identifier representing a nucleotide sequence found in or transcribed by the gene; and (6) the name or title of the gene, where one is given. It is noted that sometimes two probe sets in Table 1 will refer to a single gene, and these duplications have been maintained because they are believed to reflect 5 different splice variants of that gene. In such a case, the associated sequence files will reflect the different splicotypes for that gene. The genes in Table 1 have been sorted by their parametric p-value to indicate the genes that are most highly regulated by gefitinib first.

[0041] In addition, the present invention will also be useful for the validation in other studies of the clinical significance of many of the specific biomarkers described herein, as well as the identification of preferred biomarker profiles, highly sensitive biomarkers, and targets for the design of novel therapeutic products and strategies. The biomarkers described herein are particularly useful in clinical practice to select the patients who will benefit most from EGFR inhibitor treatment, and in specific embodiments, from cetuximab treatment, panitumumab treatment, nimotuzumab treatment, matuzumab treatment, gefitinib treatment, erlotinib treatment, and/or lapatinib treatment.

[0042] The present inventors have already used the biomarkers described herein to identify specific targets for the further development of diagnostic and therapeutic approaches used in cancer, and these studies are described in detail in the Examples. For example, E-cadherin is a calcium-dependent epithelial cell adhesion molecule that plays an important role in tumor invasiveness and metastatic potential. Reduced E-cadherin expression is associated with tumor cell dedifferentiation, advanced stage and reduced survival in patients with NSCLC. Using Western blot analysis, E-cadherin was expressed in three cell lines highly sensitive to gefitinib and its expression was lacking in six gefitinib resistant cell lines tested. Real-time RT-PCR was used to evaluate the gene expression pattern in 11 NSCLC cell lines and compared to gene expression in normal bronchial epithelium. E-cadherin expression was elevated in cell lines sensitive to gefitinib and downregulated in the resistant cell lines as compared to the normal bronchial epithelium. The expression of E-cadherin is regulated by zinc finger inhibitory proteins by the recruitment of histone deacetylases (HDAC). Using real-time RT-PCR, the expression of the two zinc-finger transcription factors, δEF1/ZEB1 and SIP1/ZEB2, involved in E-cadherin repression was evaluated. Results showed that ZEB1 was expressed in gefitinib resistant cell lines and its expression was lacking in gefitinib sensitive cell lines. The present inventors have also found that δEF1/ZEB1 and SIP1/ZEB2 may regulate Her3, which is an EGFR heterodimer. These data indicate that the expression of ZEB1 may predict resistance to EGFR tyrosine kinase inhibitors and future studies directed at modulating the regulation of E-cadherin expression are expected to enhance the activity of EGFR inhibitors in various cancers, including NSCLC.

[0043] Epithelial-to-Mesenchymal Transition (EMT) refers to the process whereby a cell with a gene expression/phenotype characteristic of epithelial cell (i.e., expressing specific proteins, factors, and molecules) changes or alters the genes or their level of expression which results in a change in the phenotype of the cell as exhibited by the alteration or change in the genes expressed.

[0044] Epithelial and mesenchymal cells represent distinct lineages, each with a unique gene expression profile that imparts attributes specific to each cell type. Turning an epithelial cell into a mesenchymal cell requires alterations in morphology, cellular architecture, adhesion and migration capacity. Advanced tumor cells frequently exhibit a conspicuous down-regulation of epithelial markers and a loss of intercellular junctions, resulting in a loss of epithelial polarity and reduced intercellular adhesion. The loss of epithelial features is often accompanied by increased cell motility and expression of mesenchymal genes. EMT includes loss of contact inhibition, altered growth control, and enhanced invasiveness (Christiansen and Rajasekaran, Cancer Res., 66(17): 8319-8326 (2006); and Thiery et al., Curr. Opin. Cell. Biol., 15: 740-6 (2003)). Molecular and morphologic features indicative of EMT correlate with poor histologic differentiation, destruction of tissue integrity, and metastasis. EMT provides mechanisms for epithelial cells to overcome the physical constraints imposed on them by intercellular junctions and adopt a motile phenotype (Burdsal et al. Development, 118:829-44 (1993); and Nieto et al., Mech, Dev., 105:27-35 (2001)).

[0045] Commonly used molecular markers for EMT include increased expression of N-cadherin and vimentin, nuclear localization of β-catenin, and increased production of the transcription factors such as Snail1 (Snail), Snail2 (Slug), Twist, EF1/ZEB1, SIP1/ZEB2, and/or E47 that inhibit E-cadherin production. Phenotypic markers for EMT include, but are not limited to, an increased capacity for migration and three-dimensional invasion, as well as resistance to apoptosis. These markers have further been correlated with induction of EMT and an association with cancerous phenotypes. By way of example, loss of E-cadherin expression has been correlated with the transition of a pancreatic cancer from epithelial to mesenchymal. (Winter et al., Clin Cancer Res., 14(2): 412-418 (2008)).

[0046] The occurrence of EMT during tumor progression allows tumor cells to acquire the capacity to infiltrate surrounding tissue and to ultimately metastasize to distant sites. Changes in gene expression within tumor cells can indicate a progression from epithelial or epithelial-like gene expression pattern to a mesenchymal or mesenchymal-like gene expression pattern. By way of example, the identification of loss of E-cadherin is correlated with metastatic carcinoma as well as resistance to cancer therapies such as EGFR inhibitors. Analysis of many different types of cancer reveals that circulating tumor cells, or those found as micrometastases, evidence mesenchymal conversion based on changes of expression in a set of markers. These markers include, but are not limited to, EGFR, E-cadherin, ErbB3, RAB25, integrin beta 6, cadherin-2, fibroblast growth factor binding protein 1, distal-less homeo box 1, ZEB1 (transcription factor 8), SIP1, and vimentin.

[0047] By way of example, an epithelial-like gene expression profile includes expression, or increase expression of genes such as E-cadherin, ErbB3, or EGFR. An epithelial-like gene expression profile can include the expression of one or more of these genes, at least two, or at least three of these genes.

[0048] As with the previously described therapy-resistant cancers, the expression levels of E-cadherin, ErbB3, RAB25, integrin beta 6, cadherin-2, fibroblast growth factor binding protein 1, distal-less homeo box 1, ZEB1 (transcription factor 8), SIP1, TGF-β, FOXC2, GSK-3β, Smad-3, Pez, Snail1, Snail2, ILK, and vimentin represent genes that are common to EMT characteristics as well as with those epithelial-based tumor cells/cancers that develop resistance to their respective therapies.

[0049] In addition to the aforementioned genes and cancers, the expression levels of E-cadherin and vimentin can be correlated with sensitivity and/or resistance to tyrosine kinase EGFR inhibitors in head and neck cancer as well as non-small cell lung cancer. (Frederick et al., Mol. Cancer. Ther., 6(6): 1683-1691 (2006)). Similarly, HER-3 expression correlates with sensitivity or resistance to an EGFR inhibitor (erlotinib) in pancreatic tumor cell lines as well as colorectal tumor cell lines. (Buck et al., Mol. Cancer. Ther. 5(8): 2051-2059 (2006)). Furthermore, sensitivity and/or resistance of urothelial cancer to EGFR-antibody therapy is correlated with the expression levels of HER-4, E-cadherin, β-catenin, and PDGF-β. (Black et al., Clin. Cancer. Res., 14(5): 1478-1486 (2008)). Finally, multiple genes associated with the HER pathway, including E-cadherin, correlated with sensitivity and/or resistance to gefitinib in non-small cell lung cell cancer cell lines. (Coldren et al., Mol. Cancer. Res. 4(8): 521-528 (2006)).

[0050] In one non-limiting example, the present invention also relates to protein profiles which can discriminate between sensitive and resistant NSCLC tumors. Additional compounds may be screened for activity and/or efficacy in treating various other cancers. Similarly, biomarkers related to the sensitivity or resistance of a cancer to a given compound of can be screened. Furthermore, additional cancer types can be screened with the methods described herein.

[0051] Prior to the present invention, to the best of the present inventors' knowledge, no single marker, or marker panel, has been demonstrated to be useful for selection of lung cancer patients who will benefit from EGFR inhibitors, and particularly, gefitinib, treatment. Nor are there any such markers (related to EGFR inhibitors) identified for other types of cancer.

[0052] Accordingly, in one example using the gene expression profiles disclosed in Table 1 for gefitinib-sensitive and resistant cells, one can rapidly, effectively and efficiently screen patients/human tumors for a level of sensitivity or resistance to gefitinib and also to other EGFR inhibitors having biological activity substantially similar to gefitinib (i.e., drugs having similar activities, gefitinib agonists and other derivatives). The results will allow for the identification of tumors/patients that are likely to benefit from administration of the drug and therefore, the genes are used to enhance the ability of the clinician to develop prognosis and treatment protocols for the individual patient. In addition, genes identified in Table 1 can be further validated as targets and then used in assays to identify therapeutic reagents useful for regulating the expression or activity of the target in a manner that improves sensitivity of a cell to gefitinib or analogs thereof. The knowledge provided from the expression profile of genes described herein and the identification additional genes using similar methods can also be used to identify the molecular mechanisms of EGFR inhibition, such knowledge being useful for the further development of new therapies and even analogs of gefitinib or other EGFR inhibitors with improved efficacies in cancer treatment. Moreover, given the knowledge of these genes, one can produce novel combinations of polynucleotides and/or antibodies and/or peptides for use in the various assays, diagnostic and/or therapeutic approaches described herein.

[0053] The present invention is also illustrative of methods by which patients can be evaluated for predicted sensitivity or resistance to EGFR inhibitors other than gefitinib, and of methods of identifying additional genes and gene panels that are regulated differentially by cells that are sensitive to or resistant to gefitinib or other EGFR inhibitors. Such genes and panels of genes can then be used in the assays and methods described herein and as targets useful for the development of novel EGFR inhibitors and therapeutic formulations. In one embodiment, the gene or genes whose expression is detected is selected from among E-cadherin, Erb3, Her3, vimentin, cyclin D3, cyclin D1, EGFR, and any combination thereof. In yet another embodiment, the gene or genes whose expression is detected is selected from E-cadherin, ErbB3, RAB25, integrin beta 6, cadherin-2, fibroblast growth factor binding protein 1, distal-less homeo box 1, ZEB1 (transcription factor 8), and SIP1. In one embodiment, the gene is E-cadherin. In yet another embodiment, the gene is RAB25. In yet another embodiment, the gene is integrin beta 6. In yet another embodiment, the gene is ZEB1. In yet another embodiment, the gene is SIP1. In another embodiment, the gene is vimentin. It will be understood that any of the genes to be detected as described herein can be correlated with any of the EGFR inhibitors also described herein in more detail. It is understood that the gene or genes described herein are inclusive of allelic variant isoforms, synthetic nucleic acids, nucleic acid isolated from tissue and cells, and modified forms thereof. It is also understood that the genes described herein are also known to exist in various forms, including variants and mutants, and are contemplated herein. The gene or genes described herein further include nucleic acid sequences having at least 85% identity with the gene to be detected and are included within the invention and embodiments described herein. In some embodiments, the % identity is 90%. In some embodiments, the % identity is 95%. In yet other embodiments, the % identity is at least 99%.

[0054] In addition to gefitinib, various tyrosine-kinase inhibitors, including but not limited to EGFR inhibitors, are contemplated herein. Currently there are two main classes of EGFR inhibitors: anti-EGFR family tyrosine kinase inhibitors (small molecules) and anti-EGFR monoclonal antibodies. Both categories are contemplated within the meaning of EGFR inhibitor used herein. Examples of small molecules include EGFR-specific and reversible inhibitors such as, for example, gefitinib (IRESSA®, ZD1839), erlotinib (TARCEVA®, OSI-774, CP-358), or PKI-166; EGFR-specific and irreversible inhibitors, such as EKI-569; a PAN-HER (human EGF receptor family) reversible inhibitor, such as GW2016 (targets both EGFR and Her2/neu); and a PAN-HER irreversible inhibitor, such as CI-1033 (4-anilinoquinazoline).

[0055] Further examples of tyrosine kinase inhibitors and EGFR antagonists include, but are not limited to, small molecules such as compounds described in U.S. Pat. Nos. 5,616,582, 5,457,105, 5,475,001, 5,654,307, 5,679,683, 6,084,095, 6,265,410, 6,455,534, 6,521,620, 6,596,726, 6,713,484, 5,770,599, 6,140,332, 5,866,572, 6,399,602, 6,344,459, 6,602,863, 6,391,874, 6,344,455, 5,760,041, 6,002,008, and 5,747,498, as well as the following PCT publications: WO98/14451, WO98/50038, WO99/09016, and WO99/24037. Additional small molecule EGFR antagonists include, but are not limited to, PD 183805 (CI 1033, 2-propenamide, N-[4-[(3-chloro-4-fluorophenyl)amino]-7-[3-(4-morpholinyl)propoxy]-6-quin-azolinyl]-, dihydrochloride, Pfizer Inc.); ZM 105180 ((6-amino-4-(3-methylphenyl-amino)-quinazoline, Zeneca); BIBX-1382 (N-8-(3-chloro-4-fluoro-phenyl)-N-2-(1-methyl-piperidin-4-yl)-pyrimido[5,-4-d]pyrimidine-2,8-diamine, Boehringer Ingelheim); PKI-166 ((R)-4-[4-[(1-phenylethyl)amino]-1H-pyrrolo[2,3-d]pyrimidin-6-yl]-phenol)-; (R)-6-(4-hydroxyphenyl)-4-[(1-phenylethyl)amino]-7H-pyrrolo[2,3-d]pyrimidine); CL-387785 (N-[4-[(3-bromophenyl)amino]-6-quinazolinyl]-2-butynamide); EKB-569 (N-[4-[(3-chloro-4-fluorophenyl)amino]-3-cyano-7-ethoxy-6-quinolinyl]-44-dimethylamino)-2-butenamide) (Wyeth); Imatinib; STI-571; LFM-A13; PD153035; Piceatannol; PP1, Lapatinib (Tykerb®, GW572016, GlaxoSmithKline); AEE788; SU4132; SU6656; Semazanib (semaxanib); SU6668, ZD6126 AG1478 (Sugen); and AG1571 (SU 5271; Sugen). Further examples of EGFR and HER family antagonists or inhibitors will be known in the art and are also contemplated herein.

[0056] Examples of monoclonal antibodies and antibody variants, fusions, derivatives, and fragments thereof include C225 (CETUXIMAB; ERBITUX®), ABX-EGF (human) (Abgenics, San Francisco, Calif.), EMD-72000 (humanized), h-R3 (humanized), and MDX-447 (bi-specific, EGFR-CK64); MAb 579 (ATCC CRL HB 8506), MAb 455 (ATCC CRL HB8507), MAb 225 (ATCC CRL 8508), MAb 528 (ATCC CRL 8509) (see, U.S. Pat. No. 4,943,533, Mendelsohn et al.) and variants thereof, and reshaped human 225 (H225) (see, WO 96/40210, Imclone Systems Inc.); IMC-11F8, a fully human, EGFR-targeted antibody (Imclone); antibodies that bind type II mutant EGFR (U.S. Pat. No. 5,212,290); humanized and chimeric antibodies that bind EGFR as described in U.S. Pat. No. 5,891,996; and human antibodies that bind EGFR, such as ABX-EGF or panitumumab (see WO98/50433, Abgenix/Amgen); EMD 55900 (Stragliotto et al. Eur. J. Cancer 32A:636-640 (1996); human EGFR antibody, HuMax-EGFR (GenMab); fully human antibodies known as E1.1, E2.4, E2.5, E6.2, E6.4, E2.11, E6. 3 and E7.6. 3 and described in U.S. Pat. No. 6,235,883; and mAb 806 or humanized mAb 806 (Johns et al., J. Biol. Chem. 279(29):30375-30384 (2004)).

[0057] The anti-EGFR antibody may be conjugated with a cytotoxic agent, thus generating an immunoconjugate (see, e.g., EP659,439A2, Merck Patent GmbH). Additionally, fusion proteins, single chain antibodies, and fragments or variants thereof based upon the antibodies and epitope binding regions of the antibodies described above are also contemplated herein. The construction of such polypeptides, fusion proteins, and single chain antibodies is known in the art and can include, but is not limited to, conventional recombinant techniques.

[0058] The present invention provides methods by which patients can be evaluated for predicted sensitivity or resistance to antibody EGFR inhibitors, and of methods of identifying additional genes and gene panels that are regulated differentially by cells that are sensitive to or resistant to such antibody EGFR inhibitors. In some embodiments described herein, the genes detected are selected from E-cadherin, RAB25, integrin beta 6, vimentin, TC8, ZEB1 and SIP1 and the EGFR inhibitor is selected from cetuximab, panitumumab, nimotuzumab, and Metuzumab. In one embodiment, the EGFR inhibitor is cetuximab. In another embodiment, the inhibitor is panitumumab. In yet another embodiment, the EGFR inhibitor is nimotuzumab. In another embodiment, the EGFR inhibitor is Metuzumab. In a further embodiment, the gene is E-cadherin and the antibody is cetuximab. In another embodiment, the gene is E-cadherin and the antibody is panitumumab. In a further embodiment, the gene is E-cadherin and the antibody is nimotuzumab. In another embodiment, the gene is E-cadherin and the antibody is matuzumab.

[0059] In one embodiment, the gene is ZEB1 and the antibody is cetuximab. In one embodiment, the gene is ZEB1 and the antibody is panitumumab. In a further embodiment, the gene is ZEB1 and the antibody is nimotuzumab. In another embodiment, the gene is ZEB1 and the antibody is matuzumab.

[0060] In one embodiment, the gene is SIP1 and the antibody is cetuximab. In one embodiment, the gene is SIP1 and the antibody is panitumumab. In a further embodiment, the gene is SIP1 and the antibody is nimotuzumab. In another embodiment, the gene is SIP1 and the antibody is matuzumab.

[0061] It will be understood that sensitivity or resistance to any of the EGFR inhibitors described herein can be correlated with any of the genes also described herein.

[0062] The methods and embodiments of the invention described herein for the detection of genes correlated with EGFR sensitivity or resistance can further provide for methods of treatment based on such detection.

[0063] The transcription factors ZEB1 and SIP1 are also known to downregulate or inhibit the expression of E-cadherin. In one example, siRNA inhibitors of ZEB1 and/or SIP1 can upregulate expression of E-cadherin. The embodiments described herein can also be used in combination with methods of treating cancer in a patient by upregulating E-cadherin in a cancer cell via the administration of at least one ZEB1 or SIP1 inhibitor and the administration of an EGFR inhibitor. In one embodiment, a ZEB1 inhibitor is administered. In yet another embodiment, a SIP1 inhibitor is administered. In additional embodiments, a ZEB1 and a SIP1 inhibitor are administered. The ZEB1 and SIP1 inhibitors can be administered simultaneously or at different time points. In some embodiments, the administration of the ZEB1 or SIP1 inhibitor can be simultaneous with the EGFR inhibitor. In some embodiments the ZEB1 or SIP1 inhibitor can be administered prior to the EGFR inhibitor. In some embodiments, the ZEB1 or SIP1 inhibitor can be administered after the EGFR inhibitor. It will be understood that the embodiments described herein for the administration of ZEB1 and/or SIP1 inhibitors to upregulate E-cadherin expression are useful with any of the embodiments regarding the types of cancer to be treated also described herein.

[0064] In addition to the NSCLC described in several examples, the methods described herein can be used to identify biomarkers in numerous other cancer types. While NSCLC is used as an exemplary cancer, it will be understood in the art that other cancers are useful, and thus within the scope of the methods described herein. Such additional cancers include, but are not limited to, cancers that are epithelial malignancies (having epithelial origin), and particularly any cancers (tumors) that express EGFR. In one non-limiting example, provided herein is a method to identify a cancer that is resistant to EGFR inhibitors and in one aspect, the cancer is an epithelial malignancy that is resistant to EGFR inhibitors. In an EGFR inhibitor-resistant cancer, the cancer can include tumors (cancerous cells) with little or no gain in copy number (low/no gene amplification or polysomy), tumors that are low expressors of EGFR protein (in the lower 50% of an appropriate scoring protocol, as in PCT Publication No. WO 2005/117553), or especially a combination of low/no gain of EGFR gene and low/no expression of EGFR protein. EGFR-resistant cancers can also include tumors that have low/no gain in EGFR and are P-Akt positive, or tumors with EGFR gene amplification and/or polysomy, but that are P-Akt negative. EGFR-resistant cancers can also include tumors without mutations in EGFR that meet one or more of the other criteria for poor or non-responders as discussed above. Non-limiting examples of premalignant or precancerous cancers/tumors having epithelial origin include actinic keratoses, arsenic keratoses, xeroderma pigmentosum, Bowen's disease, leukoplakias, metaplasias, dysplasias and papillomas of mucous membranes, e.g. of the mouth, tongue, pharynx and larynx, precancerous changes of the bronchial mucous membrane such as metaplasias and dysplasias (especially frequent in heavy smokers and people who work with asbestos and/or uranium), dysplasias and leukoplakias of the cervix uteri, vulval dystrophy, precancerous changes of the bladder, e.g. metaplasias and dysplasias, papillomas of the bladder as well as polyps of the intestinal tract. Non-limiting examples of semi-malignant or malignant cancers/tumors of the epithelial origin are breast cancer, skin cancer (e.g., basal cell carcinomas), bladder cancer (e.g., superficial bladder carcinomas), pancreactic cancer, colon cancer, gastrointestinal (GI) cancer, prostate cancer, uterine cancer, cervical cancer, ovarian cancer, esophageal cancer, stomach cancer, laryngeal cancer, head and neck cancer, and lung cancer.

[0065] In some embodiments, the cancer is selected from breast cancer, pancreatic cancer, colon cancer, and head and neck cancer. In one embodiment, the cancer is pancreatic cancer. In another embodiment, the cancer is colon cancer. In yet another embodiment, the cancer is head and neck cancer. In another embodiment, the cancer is breast cancer.

[0066] Provided herein is a method of selecting a cancer patient having a cancer of epithelial origin comprising providing a sample of the cancer from the patient, detecting the expression of one or more genes whose expression has been correlated with sensitivity or resistance to an EGFR inhibitor, comparing the level of expression of the gene or genes detected in the patient sample to a level of expression of the gene or genes that has been correlated with sensitivity or resistance to the EGFR inhibitor. In a further embodiment, a patient is selected as being predicted to benefit from administration of the EGFR inhibitor if the expression of the gene or genes is similar to the expression of the gene or genes that have been correlated with sensitivity to the EGFR inhibitor. Non-limiting examples of cancers having epithelial origin include breast cancer, skin cancer, bladder cancer, pancreatic cancer, colon cancer, prostate cancer, uterine cancer, cervical cancer, ovarian cancer, esophageal cancer, stomach cancer, gastrointestinal cancer (GI), pancreatic cancer, laryngeal cancer, head and neck cancer, and lung cancer. In one embodiment, the cancer is breast cancer. In another embodiment, the cancer is pancreatic cancer. In another embodiment, the cancer is colon cancer. In yet another embodiment, the cancer is head and neck cancer.

[0067] It will be understood that any of the cancers described herein can be assayed for gene expression of any of the genes described herein and further correlated with sensitivity or resistance to any of the EGFR inhibitors described herein.

[0068] Various definitions and aspects of the invention will be described below, but the invention is not limited to any specific embodiments that may be used for illustrative or exemplary purposes.

[0069] According to the present invention, in general, the biological activity or biological action of a protein refers to any function(s) exhibited or performed by the protein that is ascribed to the naturally occurring form of the protein as measured or observed in vivo (i.e., in the natural physiological environment of the protein) or in vitro (i.e., under laboratory conditions). Modifications of a protein, such as in a homologue or mimetic (discussed below), may result in proteins having the same biological activity as the naturally occurring protein, or in proteins having decreased or increased biological activity as compared to the naturally occurring protein. Modifications which result in a decrease in protein expression or a decrease in the activity of the protein, can be referred to as inactivation (complete or partial), down-regulation, or decreased action of a protein. Similarly, modifications which result in an increase in protein expression or an increase in the activity of the protein can be referred to as amplification, overproduction, activation, enhancement, up-regulation or increased action of a protein.

[0070] According to the present invention, a “downstream gene” or “endpoint gene” is any gene, the expression of which is regulated (up or down) within a gefitinib sensitive or resistant cell. Selected sets of one, two, and preferably several or many of the genes (up to the number equivalent to all of the genes) of this invention can be used as end-points for rapid screening of patient cells for sensitivity or resistance to EGFR inhibitors such as gefitinib and for the other methods as described herein, including the identification of novel targets for the development of new cancer therapeutics.

[0071] As used herein, the term “homologue” is used to refer to a protein or peptide which differs from a naturally occurring protein or peptide (i.e., the “prototype” or “wild-type” protein) by minor modifications to the naturally occurring protein or peptide, but which maintains the basic protein and side chain structure of the naturally occurring form. Such changes include, but are not limited to: changes in one or a few amino acid side chains; changes one or a few amino acids, including deletions (e.g., a truncated version of the protein or peptide) insertions and/or substitutions; changes in stereochemistry of one or a few atoms; and/or minor derivatizations, including but not limited to: methylation, glycosylation, phosphorylation, acetylation, myristoylation, prenylation, palmitation, amidation and/or addition of glycosylphosphatidyl inositol. A homologue can have either 5 enhanced, decreased, or substantially similar properties as compared to the naturally occurring protein or peptide. A homologue can include an agonist of a protein or an antagonist of a protein.

[0072] Homologues can be the result of natural allelic variation or natural mutation. A naturally occurring allelic variant of a nucleic acid encoding a protein is a gene that occurs at essentially the same locus (or loci) in the genome as the gene which encodes such protein, but which, due to natural variations caused by, for example, mutation or recombination, has a similar but not identical sequence. Allelic variants typically encode proteins having similar activity to that of the protein encoded by the gene to which they are being compared. One class of allelic variants can encode the same protein but have different nucleic acid sequences due to the degeneracy of the genetic code. Allelic variants can also comprise alterations in the 5′ or 3′ untranslated regions of the gene (e.g., in regulatory control regions). Allelic variants are well known to those skilled in the art.

[0073] An agonist can be any compound which is capable of mimicking, duplicating or approximating the biological activity of a naturally occurring or specified protein, for example, by associating with (e.g., binding to) or activating a protein (e.g., a receptor) to which the natural protein binds, so that activity that would be produced with the natural protein is stimulated, induced, increased, or enhanced. For example, an agonist can include, but is not limited to, a protein, compound, or an antibody that selectively binds to and activates or increases the activation of a receptor bound by the natural protein, other homologues of the natural protein, and any suitable product of drug design that is characterized by its ability to agonize (e.g., stimulate, induce, increase, enhance) the biological activity of a naturally occurring protein.

[0074] An antagonist refers to any compound or agent which is capable of acting in a manner that is antagonistic to (e.g., against, a reversal of, contrary to) the action of the natural agonist, for example by interacting with another protein or molecule in a manner that the biological activity of the naturally occurring protein or agonist is decreased (e.g., reduced, inhibited, blocked). Such a compound can include, but is not limited to, an antibody that selectively binds to and blocks access to a protein by its natural ligand, or reduces or inhibits the activity of a protein, a product of drug design that blocks the protein or reduces the biological activity of the protein, an anti-sense nucleic acid molecule that binds to a nucleic acid molecule encoding the protein and prevents expression of the protein, a ribozyme that binds to the RNA and prevents expression of 5 the protein, RNAi, an aptamer, and a soluble protein, which competes with a natural receptor or ligand.

[0075] Agonists and antagonists that are products of drug design can be produced using various methods known in the art. Various methods of drug design, useful to design mimetics or other compounds useful in the present invention are disclosed in Maulik et al., 1997, Molecular Biotechnology Therapeutic Applications and Strategies, Wiley-Liss, Inc., which is incorporated herein by reference in its entirety. An agonist or antagonist can be obtained, for example, from molecular diversity strategies (a combination of related strategies allowing the rapid construction of large, chemically diverse molecule libraries), libraries of natural or synthetic compounds, in particular from chemical or combinatorial libraries (i.e., libraries of compounds that differ in sequence or size but that have the similar building blocks) or by rational, directed or random drug design. See for example, Maulik et al., supra.

[0076] In a molecular diversity strategy, large compound libraries are synthesized, for example, from peptides, oligonucleotides, natural or synthetic steroidal compounds, carbohydrates and/or natural or synthetic organic and non-steroidal molecules, using biological, enzymatic and/or chemical approaches. The critical parameters in developing a molecular diversity strategy include subunit diversity, molecular size, and library diversity. The general goal of screening such libraries is to utilize sequential application of combinatorial selection to obtain high-affinity ligands for a desired target, and then to optimize the lead molecules by either random or directed design strategies. Methods of molecular diversity are described in detail in Maulik, et al., ibid.

[0077] As used herein, the term “mimetic” is used to refer to any natural or synthetic compound, peptide, oligonucleotide, carbohydrate and/or natural or synthetic organic molecule that is able to mimic the biological action of a naturally occurring or known synthetic compound.

[0078] As used herein, the term “putative regulatory compound” or “putative regulatory ligand” refers to compounds having an unknown regulatory activity, at least with respect to the ability of such compounds to regulate the expression or biological activity of a gene or protein encoded thereby, or to regulate sensitivity or resistance to an EGFR inhibitor as encompassed by the present invention.

[0079] In accordance with the present invention, an isolated polynucleotide, which phrase can be used interchangeably with “an isolated nucleic acid molecule”, is a nucleic acid 5 molecule that has been removed from its natural milieu (i.e., that has been subject to human manipulation), its natural milieu being the genome or chromosome in which the nucleic acid molecule is found in nature. As such, “isolated” does not necessarily reflect the extent to which the nucleic acid molecule has been purified, but indicates that the molecule does not include an entire genome or an entire chromosome in which the nucleic acid molecule is found in nature. Polynucleotides useful in the plurality of polynucleotides of the present invention (described below) are typically a portion of a gene or transcript thereof of the present invention that is suitable for use, for example, as a hybridization probe or PCR primer for the identification of a full-length gene, a transcript thereof, or a polynucleotide derived from the gene or transcript (e.g., cDNA), in a given sample (e.g., a cell sample). An isolated nucleic acid molecule can include a gene or a portion of a gene (e.g., the regulatory region or promoter), for example, to produce a reporter construct according to the present invention. An isolated nucleic acid molecule that includes a gene is not a fragment of a chromosome that includes such gene, but rather includes the coding region and regulatory regions associated with the gene, but no additional genes naturally found on the same chromosome. An isolated nucleic acid molecule can also include a specified nucleic acid sequence flanked by (i.e., at the 51 and/or the 3′ end of the sequence) additional nucleic acids that do not normally flank the specified nucleic acid sequence in nature (i.e., heterologous sequences). Isolated nucleic acid molecules can include DNA, RNA (e.g., mRNA), or derivatives of either DNA or RNA (e.g., cDNA). Although the phrase “nucleic acid molecule” or “polynucleotide” primarily refers to the physical nucleic acid molecule and the phrase “nucleic acid sequence” primarily refers to the sequence of nucleotides on the nucleic acid molecule, the two phrases can be used interchangeably, especially with respect to a nucleic acid molecule, or a nucleic acid sequence, being capable of encoding a protein.

[0080] Preferably, an isolated nucleic acid molecule of the present invention is produced using recombinant DNA technology (e.g., polymerase chain reaction (PCR) amplification, cloning) or chemical synthesis. Isolated nucleic acid molecules include natural nucleic acid molecules and homologues thereof, including, but not limited to, natural allelic variants and modified nucleic acid molecules in which nucleotides have been inserted, deleted, substituted, and/or inverted in such a manner that such modifications provide the desired effect on the biological activity of the protein as described herein. Protein homologues (e.g., proteins encoded by nucleic acid homologues) have been discussed in detail above.

[0081] The minimum size of a nucleic acid molecule or polynucleotide of the present invention is a size sufficient to encode a protein having a desired biological activity, sufficient to form a probe or oligonucleotide primer that is capable of forming a stable hybrid with the complementary sequence of a nucleic acid molecule encoding the natural protein (e.g., under moderate, high or very high stringency conditions), or to otherwise be used as a target in an assay or in any therapeutic method discussed herein. If the polynucleotide is an oligonucleotide probe or primer, the size of the polynucleotide can be dependent on nucleic acid composition and percent homology or identity between the nucleic acid molecule and a complementary sequence as well as upon hybridization conditions per se (e.g., temperature, salt concentration, and formamide concentration). The minimum size of a polynucleotide that is used as an oligonucleotide probe or primer is at least about 5 nucleotides in length, and preferably ranges from about 5 to about 50 or about 500 nucleotides, including any length in between, in whole number increments (i.e., 5, 6, 7, 8, 9, 10, . . . 33, 34, . . . 256, 257, . . . 500), and more preferably from about 10 to about 40 nucleotides, and most preferably from about 15 to about 40 nucleotides in length. Additional polynucleotide probes can be about 500 nucleotides, about 750 nucleotide, about 1000 nucleotides, about 2000 nucleotides, about 5000 nucleotides, or about 10,000 nucleotides. In one aspect, the oligonucleotide primer or probe is typically at least about 12 to about 15 nucleotides in length if the nucleic acid molecules are GC-rich and at least about 15 to about 18 bases in length if they are AT-rich. There is no limit, other than a practical limit, on the maximal size of a nucleic acid molecule of the present invention, in that the nucleic acid molecule can include a portion of a protein-encoding sequence or a nucleic acid sequence encoding a full-length protein.

[0082] An isolated protein, according to the present invention, is a protein (including a peptide) that has been removed from its natural milieu (i.e., that has been subject to human manipulation) and can include purified proteins, partially purified proteins, recombinantly produced proteins, and synthetically produced proteins, for example. As such, “isolated” does not reflect the extent to which the protein has been purified. An isolated protein useful as an antagonist or agonist according to the present invention can be isolated from its natural source, produced recombinantly or produced synthetically.

[0083] Smaller peptides useful as regulatory peptides are typically produced synthetically by methods well known to those of skill in the art.

[0084] According to the present invention, the phrase “selectively binds to” refers to the ability of an antibody, antigen binding fragment or binding partner (antigen binding peptide) to preferentially bind to specified proteins. More specifically, the phrase “selectively binds” refers to the specific binding of one protein to another (e.g., an antibody, fragment thereof, or binding partner to an antigen), wherein the level of binding, as measured by any standard assay (e.g., an immunoassay), is statistically significantly higher than the background control for the assay. For example, when performing an immunoassay, controls typically include a reaction well/tube that contain antibody or antigen binding fragment alone (i.e., in the absence of antigen), wherein an amount of reactivity (e.g., non-specific binding to the well) by the antibody or antigen binding fragment thereof in the absence of the antigen is considered to be background. Binding can be measured using a variety of methods standard in the art including enzyme immunoassays (e.g., ELISA), immunoblot assays, etc.).

[0085] In some embodiments of the present invention, a compound is contacted with one or more nucleic acids or proteins. Such methods can include cell-based assays, or non-cell-based assay. In one embodiment, a target gene is expressed by a cell (i.e., a cell-based assay). In one embodiment, the conditions under which a cell expressing a target is contacted with a putative regulatory compound, such as by mixing, are conditions in which the expression or biological activity of the target (gene or protein encoded thereby) is not stimulated (activated) if essentially no regulatory compound is present. For example, such conditions include normal culture conditions in the absence of a known activating compound or other equivalent stimulus. The putative regulatory compound is then contacted with the cell. In this embodiment, the step of detecting is designed to indicate whether the putative regulatory compound alters the expression and/or biological activity of the gene or protein target as compared to in the absence of the putative regulatory compound (i.e., the background level).

[0086] In accordance with the present invention, a cell-based assay as described herein is conducted under conditions which are effective to screen for regulatory compounds or to profile gene expression as described in the methods of the present invention. Effective conditions include, but are not limited to, appropriate media, temperature, pH and oxygen conditions that permit the growth of the cell that expresses the receptor. An appropriate, or effective, medium is typically a solid or liquid medium comprising growth factors and assimilable carbon, nitrogen and phosphate sources, as well as appropriate salts, minerals, metals and other nutrients, such as vitamins. Culturing is carried out at a temperature, pH and oxygen content appropriate for the cell. Such culturing conditions are within the expertise of one of ordinary skill in the art.

[0087] Cells that are useful in the cell-based assays of the present invention include any cell that expresses a gene that is to be investigated as a target, or in the diagnostic assays described herein, any cell that is isolated from a patient, including normal or malignant (tumor) cells.

[0088] According to the present invention, the method includes the step of detecting the expression of at least one, and preferably more than one, and most preferably, several, of the genes that are regulated differently in EGFR inhibitor-sensitive versus EGFR inhibitor-resistant cells, and particularly, of the genes that have now been shown to be regulated differently in gefitinib-sensitive versus gefitinib-resistant cells, by the present inventors. As used herein, the term “expression”, when used in connection with detecting the expression of a gene, can refer to detecting transcription of the gene and/or to detecting translation of the gene. To detect expression of a gene refers to the act of actively determining whether a gene is expressed or not. This can include determining whether the gene expression is upregulated as compared to a control, downregulated as compared to a control, or unchanged as compared to a control. Therefore, the step of detecting expression does not require that expression of the gene actually is upregulated or downregulated, but rather, can also include detecting that the expression of the gene has not changed (i.e., detecting no expression of the gene or no change in expression of the gene).

[0089] The present method includes the step of detecting the expression of at least one gene set forth in Table 1. In a preferred embodiment, the step of detecting includes detecting the expression of at least 2 genes, and preferably at least 3 genes, and more preferably at least 4 genes, and more preferably at least 5 genes, and more preferably at least 6 genes, and more preferably at least 7 genes, and more preferably at least 8 genes, and more preferably at least 9 genes, and more preferably at least 10 genes, and more preferably at least 11 genes, and more preferably at least 12 genes, and more preferably at least 13 genes, and more preferably at least 14 genes, and more preferably at least 15 genes, and so on, in increments of one (i.e., 1, 2, 3, . . . 12, 13, . . . 56, 57, . . . 78, 79 . . . ), up to detecting expression of all of the genes disclosed herein in Table 1. For example, in one aspect of the invention, the expression of at least five genes is detected, and in another aspect, the expression of at least 10 genes is detected, and in another aspect, the expression of at least 25 genes is detected, and in another aspect, the expression of at least 50 genes is detected, and in another aspect, the expression of at least 100 genes is detected, and in another aspect, the expression of at least 150 genes is detected. Preferably, larger numbers of genes in Table 1 are detected, as this will increase the sensitivity of the detection method. Analysis of a number of genes greater than 1 can be accomplished simultaneously, sequentially, or cumulatively.

[0090] In another embodiment of the invention, detecting in the sample the expression of one or more genes chosen from a panel of genes whose expression has been correlated with sensitivity or resistance to an EGFR inhibitor. For example, such genes can be identified using the methods for identifying the genes whose expression is correlated with gefitinib-resistance or sensitivity as described herein. In one aspect, the panel of genes is identified by a method comprising: (a) providing a sample of cells that are sensitive or resistant to treatment with the EGFR inhibitor; (b) detecting the expression of at least one gene in the EGFR inhibitor-sensitive cells as compared to the level of expression of the gene or genes in the EGFR inhibitor-resistant cells; and (c) identifying a gene or genes having a level of expression in EGFR inhibitor-sensitive cells that is statistically significantly different than the level of expression of the gene or genes in EGFR inhibitor-resistant cells, as potentially being a molecule that interacts with the EGFR pathway to allow or enhance responsiveness to EGFR inhibitors. The present invention is not intended to be limited solely to the biomarkers listed in Table 1. Rather, the biomarkers of Table 1 illustrate various aspects of the invention that can now be achieved given the discoveries by the inventors. Therefore, although many of the embodiments below are discussed in terms gefitinib, it is to be understood that the methods of the invention can be extended to other EGFR inhibitors, and particularly to those that are similar in structure and/or function to gefitinib, including agonists of gefitinib.

[0091] In some embodiments, the first steps of the method to select a cancer patient that is predicted to benefit from therapeutic administration of an EGFR inhibitor, an agonist thereof, or a drug having substantially similar biological activity as EGFR inhibitor of the present invention, includes providing a patient sample (also called a test sample) and detecting in the sample the expression of a gene or genes. Suitable methods of obtaining a patient sample are known to a person of skill in the art. A patient sample can include any bodily fluid or tissue from a patient that may contain tumor cells or proteins of tumor cells. More specifically, according to the present invention, the term “test sample” or “patient sample” can be used generally to refer to a sample of any type which contains cells or products 5 that have been secreted from cells to be evaluated by the present method, including but not limited to, a sample of isolated cells, a tissue sample and/or a bodily fluid sample. According to the present invention, a sample of isolated cells is a specimen of cells, typically in suspension or separated from connective tissue which may have connected the cells within a tissue in vivo, which have been collected from an organ, tissue or fluid by any suitable method which results in the collection of a suitable number of cells for evaluation by the method of the present invention. The cells in the cell sample are not necessarily of the same type, although purification methods can be used to enrich for the type of cells that are preferably evaluated. Cells can be obtained, for example, by scraping of a tissue, processing of a tissue sample to release individual cells, or isolation from a bodily fluid.

[0092] A tissue sample, although similar to a sample of isolated cells, is defined herein as a section of an organ or tissue of the body which typically includes several cell types and/or cytoskeletal structure which holds the cells together. One of skill in the art will appreciate that the term “tissue sample” may be used, in some instances, interchangeably with a “cell sample”, although it is preferably used to designate a more complex structure than a cell sample. A tissue sample can be obtained by a biopsy, for example, including by cutting, slicing, or a punch. A bodily fluid sample, like the tissue sample, contains the cells to be evaluated for marker expression or biological activity and/or may contain a soluble biomarker that is secreted by cells, and is a fluid obtained by any method suitable for the particular bodily fluid to be sampled. Bodily fluids suitable for sampling include, but are not limited to, blood, mucous, seminal fluid, saliva, breast milk, bile and urine.

[0093] In general, the sample type (i.e., cell, tissue or bodily fluid) is selected based on the accessibility and structure of the organ or tissue to be evaluated for tumor cell growth and/or on what type of cancer is to be evaluated. For example, if the organ/tissue to be evaluated is the breast, the sample can be a sample of epithelial cells from a biopsy (i.e., a cell sample) or a breast tissue sample from a biopsy (a tissue sample). The sample that is most useful in the present invention will be cells, tissues or bodily fluids isolated from a patient by a biopsy or surgery or routine laboratory fluid collection.

[0094] Once a sample is obtained from the patient, the sample is evaluated for the detection of the expression of the gene or genes that have been correlated with sensitivity or resistance to an EGFR inhibitor (e.g., gefitinib) of the present invention. For example, as discussed above, any one or more of the genes in Table 1 comprising or expressing a transcript comprising one of SEQ ID NOs: 1-197 are useful for detection in the present method.

[0095] In one aspect, it may be desirable to select those genes for detection that are particularly highly regulated in gefitinib-sensitive cells versus gefitinib-resistant cells in that they display the largest increases or decreases in expression levels. The detection of such genes can be advantageous because the endpoint may be more clear and require less quantitation. The relative expression levels of the genes identified in the present invention are listed in Table 1, and the genes are ranked in the Table. Therefore, one can easily select subsets of particularly highly regulated genes, or subsets of genes based on some other desired characteristic to provide a more robust, sensitive, or selective assay.

[0096] In one embodiment, one of skill in the art might choose to detect genes that exhibited a fold increase above background of at least 2. In another embodiment, one of skill in the art might choose to detect genes that exhibited a fold increase or decrease above background of at least 3, and in another embodiment at least 4, and in another embodiment at least 5, and in another embodiment at least 6, and in another embodiment at least 7, and in another embodiment at least 8, and in another embodiment at least 9, and in another embodiment at least 10 or higher fold changes. It is noted that fold increases or decreases are not typically compared from one gene to another, but with reference to the background level for that particular gene.

[0097] In one aspect of the method of the present invention, the step of detecting can include the detection of expression of one or more of the genes of this invention. Expression of transcripts and/or proteins is measured by any of a variety of known methods in the art. For RNA expression, methods include but are not limited to: extraction of cellular mRNA and Northern blotting using labeled probes that hybridize to transcripts encoding all or part of one or more of the genes of this invention; amplification of mRNA expressed from one or more of the genes of this invention using gene-specific primers, polymerase chain reaction (PCR), and reverse transcriptase-polymerase chain reaction (RT-PCR), followed by quantitative detection of the product by any of a variety of means; extraction of total RNA from the cells, which is then labeled and used to probe cDNAs or oligonucleotides encoding all or part of the genes of this invention, arrayed on any of a variety of surfaces; in situ hybridization; and detection of a reporter gene.

[0098] In addition to general expression of a gene, the number of copies of a gene in a cancer cell/cells or tissue can be determined with nucleic acid probes to the genes. In one embodiment, Fluorescent in situ hybridization (FISH) can be used to detect the number of copies of a gene in a cancerous cell can be indicative of resistance or sensitivity to a compound. Established hybridization techniques such as FISH are contemplated herein. In one embodiment, the number of EGFR genes within a cancerous tissue or cell are detected using a FISH assay for the EGFR gene. Other non-limiting examples of genes that can be detected by FISH include E-cadherin and Her3. Additional genes for which knowledge of the extent of polysomy is desired will be known in the art and are contemplated herein.

[0099] Methods to measure protein expression levels generally include, but are not limited to: Western blot, immunoblot, enzyme-linked immunosorbant assay (ELISA), radioimmunoassay (RIA), immunoprecipitation, surface plasmon resonance, chemiluminescence, fluorescent polarization, phosphorescence, immunohistochemical analysis, matrix-assisted laser desorption/ionization time-of-flight (MALDI-TOF) mass spectrometry, microcytometry, microarray, microscopy, fluorescence activated cell sorting (FACS), and flow cytometry, as well as assays based on a property of the protein including but not limited to enzymatic activity or interaction with other protein partners. Binding assays are also well known in the art. For example, a BIAcore machine can be used to determine the binding constant of a complex between two proteins. The dissociation constant for the complex can be determined by monitoring changes in the refractive index with respect to time as buffer is passed over the chip (O′Shannessy et al. Anal. Biochem. 212:457 (1993); Schuster et al., Nature 365:343 (1993)). Other suitable assays for measuring the binding of one protein to another include, for example, immunoassays such as enzyme linked immunoabsorbent assays (ELISA) and radioimmunoassays (RIA); or determination of binding by monitoring the change in the spectroscopic or optical properties of the proteins through fluorescence, UV absorption, circular dichroism, or nuclear magnetic resonance (NMR).

[0100] In one embodiment, immunohistochemistry (IHC) is used to determine the expression of a gene in a cancerous tissue or cell as an indicator of said cancer's sensitivity to EGFR inhibitors. Examples of genes whose expression is detected by IHC include EGFR, ErbB3, E-cadherein, and Her3. Other genes' expression as indicators of sensitivity and/or resistance to EGFR inhibitors can be determined as described herein.

[0101] Nucleic acid arrays are particularly useful for detecting the expression of the genes of the present invention. The production and application of high-density arrays in gene expression monitoring have been disclosed previously in, for example, WO 97/10365; WO 92/10588; U.S. Pat. No. 6,040,138; U.S. Pat. No. 5,445,934; or WO95/35505, all of which are incorporated herein by reference in their entireties. Also for examples of arrays, see Hacia et al. (1996) Nature Genetics 14:441-447; Lockhart et al. (1996) Nature Biotechnol. 14:1675-1680; and De Risi et al. (1996) Nature Genetics 14:457-460. In general, in an array, an oligonucleotide, a cDNA, or genomic DNA, that is a portion of a known gene occupies a known location on a substrate. A nucleic acid target sample is hybridized with an array of such oligonucleotides and then the amount of target nucleic acids hybridized to each probe in the array is quantified. One preferred quantifying method is to use confocal microscope and fluorescent labels. The Affymetrix GeneChip™ Array system (Affymetrix, Santa Clara, Calif.) and the Atlas™ Human cDNA Expression Array system are particularly suitable for quantifying the hybridization; however, it will be apparent to those of skill in the art that any similar systems or other effectively equivalent detection methods can also be used. In a particularly preferred embodiment, 5 one can use the knowledge of the genes described herein to design novel arrays of polynucleotides, cDNAs or genomic DNAs for screening methods described herein. Such novel pluralities of polynucleotides are contemplated to be a part of the present invention and are described in detail below.

[0102] Suitable nucleic acid samples for screening on an array contain transcripts of interest or nucleic acids derived from the transcripts of interest. As used herein, a nucleic acid derived from a transcript refers to a nucleic acid for whose synthesis the mRNA transcript or a subsequence thereof has ultimately served as a template. Thus, a cDNA reverse transcribed from a transcript, an RNA transcribed from that cDNA, a DNA amplified from the cDNA, an RNA transcribed from the amplified DNA, etc., are all derived from the transcript and detection of such derived products is indicative of the presence and/or abundance of the original transcript in a sample. Thus, suitable samples include, but are not limited to, transcripts of the gene or genes, cDNA reverse transcribed from the transcript, cRNA transcribed from the cDNA, DNA amplified from the genes, RNA transcribed from amplified DNA, and the like. Preferably, the nucleic acids for screening are obtained from a homogenate of cells or tissues or other biological samples. Preferably, such sample is a total RNA preparation of a biological sample. More preferably in some embodiments, such a nucleic acid sample is the total mRNA isolated from a biological sample. Biological samples may be of any biological tissue or fluid or cells from any organism. Frequently the sample will be a “clinical sample” which is a sample derived from a patient, such as a lung tumor sample from a patient. Typical clinical samples include, but are not limited to, sputum, blood, blood cells (e.g., white cells), tissue or fine needle biopsy samples, urine, peritoneal fluid, and pleural fluid, or cells therefrom. Biological samples may also include sections of tissues, such as frozen sections or formalin fixed sections taken for histological purposes.

[0103] In one embodiment, it is desirable to amplify the nucleic acid sample prior to hybridization. One of skill in the art will appreciate that whatever amplification method is used, if a quantitative result is desired, care must be taken to use a method that maintains or controls for the relative frequencies of the amplified nucleic acids to achieve quantitative amplification. Methods of “quantitative” amplification are well known to those of skill in the art. For example, quantitative PCR involves simultaneously co-amplifying a known quantity of a control sequence using the same primers. This provides an internal standard that may be used to calibrate the PCR reaction. The high-density 5 array may then include probes specific to the internal standard for quantification of the amplified nucleic acid. Other suitable amplification methods include, but are not limited to polymerase chain reaction (PCR) Innis, et al., PCR Protocols, A guide to Methods and Application. Academic Press, Inc. San Diego, (1990)), ligase chain reaction (LCR) (see Wu and Wallace, Genomics, 4: 560 (1989), Landegren, et al., Science, 241: 1077 (1988) and Barringer, et al., Gene, 89: 117 (1990), transcription amplification (Kwoh, et al., Proc. Natl. Acad. Sci. USA, 86: 1173 (1989)), and self-sustained sequence replication (Guatelli, et al., Proc. Nat. Acad. Sci. USA, 87:1874 (1990)).

[0104] Nucleic acid hybridization simply involves contacting a probe and target nucleic acid under conditions where the probe and its complementary target can form stable hybrid duplexes through complementary base pairing. As used herein, hybridization conditions refer to standard hybridization conditions under which nucleic acid molecules are used to identify similar nucleic acid molecules. Such standard conditions are disclosed, for example, in Sambrook et al., Molecular Cloning: A Laboratory Manual, Cold Spring Harbor Labs Press, 1989. Sambrook et al., ibid., is incorporated by reference herein in its entirety (see specifically, pages 9.31-9.62). In addition, formulae to calculate the appropriate hybridization and wash conditions to achieve hybridization permitting varying degrees of mismatch of nucleotides are disclosed, for example, in Meinkoth et al., 1984, Anal. Biochem. 138, 267-284; Meinkoth et al., ibid., is incorporated by reference herein in its entirety. Nucleic acids that do not form hybrid duplexes are washed away from the hybridized nucleic acids and the hybridized nucleic acids can then be detected, typically through detection of an attached detectable label. It is generally recognized that nucleic acids are denatured by increasing the temperature or decreasing the salt concentration of the buffer containing the nucleic acids. Under low stringency conditions (e.g., low temperature and/or high salt) hybrid duplexes (e.g., DNA:DNA, RNA:RNA, or RNA:DNA) will form even where the annealed sequences are not perfectly complementary. Thus specificity of hybridization is reduced at lower stringency. Conversely, at higher stringency (e.g., higher temperature or lower salt) successful hybridization requires fewer mismatches.

[0105] High stringency hybridization and washing conditions, as referred to herein, refer to conditions which permit isolation of nucleic acid molecules having at least about 90% nucleic acid sequence identity with the nucleic acid molecule being used to probe in the hybridization reaction (i.e., conditions permitting about 10% or less mismatch of nucleotides). One of skill in the art can use the formulae in Meinkoth et al., 1984, Anal. Biochem. 138, 267-284 (incorporated herein by reference in its entirety) to calculate the appropriate hybridization and wash conditions to achieve these particular levels of nucleotide mismatch. Such conditions will vary, depending on whether DNA.-RNA or DNA:DNA hybrids are being formed. Calculated melting temperatures for DNA:DNA hybrids are 10° C. less than for DNA:RNA hybrids. In particular embodiments, stringent hybridization conditions for DNA:DNA hybrids include hybridization at an ionic strength of 6×SSC (0.9 M Na+) at a temperature of between about 20° C. and about 35° C., more preferably, between about 28° C. and about 40° C., and even more preferably, between about 35° C. and about 45° C. In particular embodiments, stringent hybridization conditions for DNA:RNA hybrids include hybridization at an ionic strength of 6×SSC (0.9 M Na+) at a temperature of between about 30° C. and about 45° C., more preferably, between about 38° C. and about 50° C., and even more preferably, between about 45° C. and about 55° C. These values are based on calculations of a melting temperature for molecules larger than about 100 nucleotides, 0% formamide and a G+C content of about 40%. Alternatively, Tm can be calculated empirically as set forth in Sambrook et al., supra, pages 9.31 to 9.62.

[0106] The hybridized nucleic acids are detected by detecting one or more labels attached to the sample nucleic acids. The labels may be incorporated by any of a number of means well known to those of skill in the art. Detectable labels suitable for use in the present invention include any composition detectable by spectroscopic, photochemical, biochemical, immunochemical, electrical, optical or chemical means. Useful labels in the present invention include biotin for staining with labeled streptavidin conjugate, magnetic beads (e.g., Dynabeads™), fluorescent dyes (e.g., fluorescein, texas red, rhodamine, green fluorescent protein, and the like), radiolabels (e.g., 3H, 125I, 35S, 14C, or 32P), enzymes (e.g., horse radish peroxidase, alkaline phosphatase and others commonly used in an ELISA), and colorimetric labels such as colloidal gold or colored glass or plastic (e.g., polystyrene, polypropylene, latex, etc.) beads. Means of detecting such labels are well known to those of skill in the art. Thus, for example, radiolabels may be detected using photographic film or scintillation counters, fluorescent markers may be detected using a photodetector to detect emitted light. Enzymatic labels are typically detected by providing the enzyme with a substrate and detecting the reaction product produced by the action of the enzyme on the substrate, and colorimetric labels are detected by simply visualizing the colored label.

[0107] The term “quantifying” or “quantitating” when used in the context of quantifying transcription levels of a gene can refer to absolute or to relative quantification. Absolute quantification may be accomplished by inclusion of known concentration(s) of one or more target nucleic acids and referencing the hybridization intensity of unknowns with the known target nucleic acids (e.g. through generation of a standard curve). Alternatively, relative quantification can be accomplished by comparison of hybridization signals between two or more genes, or between two or more treatments to quantify the changes in hybridization intensity and, by implication, transcription level.

[0108] In one aspect of the present method, in vitro cell based assays may be designed to screen for compounds that affect the regulation of genes at either the transcriptional or translational level. One, two or more promoters of the genes of this invention can be used to screen unknown compounds for activity on a given target. Promoters of the selected genes can be linked to any of several reporters (including but not limited to chloramphenicol acetyl transferase, or luciferase) that measure transcriptional read-out. The promoters can be tested as pure DNA, or as DNA bound to chromatin proteins.

[0109] In one aspect of the present method, the step of detecting can include detecting the expression of one or more genes of the invention in intact animals or tissues obtained from such animals. Mammalian (i.e. mouse, rat, monkey) or non-mammalian (i.e. chicken) species can be the test animals. Sample tissues from a patient can also be screened. The tissues to be surveyed can be either normal or malignant tissues. The presence and quantity of endogenous mRNA or protein expression of one or more of the genes of this invention can be measured in those tissues. The gene markers can be measured in tissues that are fresh, frozen, fixed or otherwise preserved. They can be measured in cytoplasmic or nuclear organ-, tissue- or cell-extracts; or in cell membranes including but not limited to plasma, cytoplasmic, mitochondrial, golgi or nuclear membranes; in the nuclear matrix; or in cellular organelles and their extracts including but not limited to ribosomes, nuclei, nucleoli, mitochondria, or golgi. Assays for endogenous expression of mRNAs or proteins encoded by the genes of this invention can be performed as described above. Alternatively, intact transgenic animals can be generated for screening for research or validation purposes.

[0110] Preferably, a gene identified as being upregulated or downregulated in a test cell according to the invention (including a sample tumor cell to be screened) is regulated in the same direction and to at least about 5%, and more preferably at least about 10%, and more preferably at least 20%, and more preferably at least 25%, and more preferably at least 30%, and more preferably at least 35%, and more preferably at least 40%, and more preferably at least 45%, and more preferably at least 50%, and preferably at least 55%, and more preferably at least 60%, and more preferably at least 65%, and more preferably at least 70%, and more preferably at least 75%, and more preferably at least 80%, and more preferably at least 85%, and more preferably at least 90%, and more preferably at least 95%, and more preferably of 100%, or any percentage change between 5% and higher in 1% increments (i.e., 5%, 6%, 7%, 8% . . . ), of the level of expression of the gene that is seen in established or confirmed EGFRi-sensitive or EGFRi-resistant cell lines. A gene identified as being upregulated or downregulated in a test cell according to the invention can also be regulated in the same direction and to a higher level than the level of expression of the gene that is seen in established or confirmed EGFRi-sensitive or EGFRi-resistant cells. In some embodiments, the cell lines are gefitinib-sensitive or gefitinib-resistant cells. In some embodiments, the cell lines are erlotinib-sensitive or erlotinib-resistant cells. In some embodiments, the cell lines are lapatinib-sensitive or lapatinib-resistant cells. In some embodiments, the cell lines are cetuximab-sensitive or cetuximab-resistant cells. In some embodiments, the cell lines are panitumumab-sensitive or panitumumab-resistant cells. In some embodiments, the cell lines are nimotuzumab-sensitive or nimotuzumab-resistant cells. In some embodiments, the cell lines are matuzumab-sensitive or matuzumab-resistant cells.

[0111] The values obtained from the test and/or control samples are statistically processed using any suitable method of statistical analysis to establish a suitable baseline level using methods standard in the art for establishing such values. Statistical significance according to the present invention should be at least p<0.05.

[0112] It will be appreciated by those of skill in the art that differences between the expression of genes in sensitive versus resistant cells may be small or large. Some small differences may be very reproducible and therefore nonetheless useful. For other purposes, large differences may be desirable for ease of detection of the activity. It will be therefore appreciated that the exact boundary between what is called a positive result and a negative result can shift, depending on the goal of the screening assay and the genes to be screened. For some assays it may be useful to set threshold levels of change. One of skill in the art can readily determine the criteria for screening of cells given the information provided herein.

[0113] The presence and quantity of each gene marker can be measured in primary tumors, metastatic tumors, locally recurring tumors, ductal carcinomas in situ, or other tumors. The markers can be measured in solid tumors that are fresh, frozen, fixed or otherwise preserved. They can be measured in cytoplasmic or nuclear tumor extracts; or in tumor membranes including but not limited to plasma, mitochondrial, golgi or nuclear membranes; in the nuclear matrix; or in tumor cell organelles and their extracts including 5 but not limited to ribosomes, nuclei, mitochondria, golgi.

[0114] The level of expression of the gene or genes detected in the test or patient sample of the invention is compared to a baseline or control level of expression of that gene. More specifically, according to the present invention, a “baseline level” is a control level of biomarker expression against which a test level of biomarker expression (i.e., in the test sample) can be compared. In the present invention, the control level of biomarker expression can be the expression level of the gene or genes in a control cell that is sensitive to the EGFR inhibitor, and/or the expression level of the gene or genes in a control cell that is resistant to the EGFR inhibitor. Other controls may also be included in the assay. In one embodiment, the control is established in an autologous control sample obtained from the patient. The autologous control sample can be a sample of isolated cells, a tissue sample or a bodily fluid sample, and is preferably a cell sample or tissue sample. According to the present invention, and as used in the art, the term “autologous” means that the sample is obtained from the same patient from which the sample to be evaluated is obtained. The control sample should be of or from the same cell type and preferably, the control sample is obtained from the same organ, tissue or bodily fluid as the sample to be evaluated, such that the control sample serves as the best possible baseline for the sample to be evaluated. In one embodiment, control expression levels of the gene or genes that have been correlated with sensitivity and/or resistance to the EGFR inhibitor has been predetermined, such as in Table 1. Such a form of stored information can include, for example, but is not limited to, a reference chart, listing or electronic file of gene expression levels and profiles for EGFR inhibitor sensitive and/or EGFR inhibitor resistant biomarker expression, or any other source of data regarding baseline biomarker expression that is useful in the method of the invention. Therefore, it can be determined, based on the control or baseline level of biomarker expression or biological activity, whether the expression level of a gene or genes in a patient sample is/are more statistically significantly similar to the baseline for EGFR resistance or EGFR sensitivity. A profile of individual gene markers, including a matrix of two or more markers, can be generated by one or more of the methods described above. According to the present invention, a profile of the genes in a tissue sample refers to a reporting of the expression level of a given gene from Table 1, and includes a classification of the gene with regard to how the gene is regulated in EGFRi-sensitive versus EGFRi-resistant cells. The data can be reported as raw data, and/or statistically analyzed by any of a variety of methods, and/or combined with any other prognostic marker(s). In some embodiments, the cells are gefitinib-sensitive or gefitinib-resistant cells. In some embodiments, the cells are gefitinib-sensitive or gefitinib-resistant cells. In some embodiments, the cells are erlotinib-sensitive or erlotinib-resistant cells. In some embodiments, the cells are lapatinib-sensitive or lapatinib-resistant cells. In some embodiments, the cells are cetuximab-sensitive or cetuximab-resistant cells. In some embodiments, the cells are panitumumab-sensitive or panitumumab-resistant cells. In some embodiments, the cells are nimotuzumab-sensitive or nimotuzumab-resistant cells. In some embodiments, the cells are matuzumab-sensitive or matuzumab-resistant cells.

[0115] Another embodiment of the present invention relates to a plurality of polynucleotides for the detection of the expression of genes as described herein. The plurality of polynucleotides consists of polynucleotides that are complementary to RNA transcripts, or nucleotides derived therefrom, of genes listed in Table 1 or otherwise identified as being useful according to the present invention (e.g., other genes correlated with sensitivity or resistance to gefitinib or another EGFR inhibitor), and is therefore distinguished from previously known nucleic acid arrays and primer sets. The plurality of polynucleotides within the above-limitation includes at least two or more polynucleotides that are complementary to RNA transcripts, or nucleotides derived therefrom, of one or more genes identified by the present inventors and listed in Table 1. Preferably, the plurality of polynucleotides is capable of detecting expression of at least two, and more preferably at least five, and more preferably at least 10, and more preferably at least 25, and more preferably at least 50, and more preferably at least 100, and more preferably at least 150, and more preferably all of the genes (or any number in between two and all of the genes, in whole increments) in a panel of genes correlated with EGFR inhibitor sensitivity and/or resistance, such as all of the genes listed in Table 1.

[0116] In one embodiment, it is contemplated that additional genes that are not regulated differently in gefitinib-sensitive versus gefitinib-resistant cells, or sensitive or resistant to any other EGFR inhibitor as described herein, can be added to the plurality of polynucleotides. Such genes would not be random genes, or large groups of unselected human genes, as are commercially available now, but rather, would be specifically selected to complement the sets of genes identified by the present invention. For example, one of skill in the art may wish to add to the above-described plurality of genes one or more genes that are of relevance because they are expressed by a particular tissue of interest (e.g., lung tissue), are associated with a particular disease or condition of interest (e.g., NSCLC), or are associated with a particular cell, tissue or body function (e.g., angiogenesis). The development of additional pluralities of polynucleotides (and antibodies, as disclosed below), which include both the above-described plurality and such additional selected polynucleotides, are explicitly contemplated by the present invention.

[0117] According to the present invention, a plurality of polynucleotides refers to at least 2, and more preferably at least 3, and more preferably at least 4, and more preferably at least 5, and more preferably at least 6, and more preferably at least 7, and more preferably at least 8, and more preferably at least 9, and more preferably at least 10, and so on, in increments of one, up to any suitable number of polynucleotides, including at least 100, 500, 1000, 104, 105, or at least 106 or more polynucleotides.

[0118] In one embodiment, the polynucleotide probes are conjugated to detectable markers. Detectable labels suitable for use in the present invention include any composition detectable by spectroscopic, photochemical, biochemical, immunochemical, electrical, optical or chemical means. Useful labels in the present invention include biotin for staining with labeled streptavidin conjugate, magnetic beads (e.g., Dynabeads™), fluorescent dyes (e.g., fluorescein, texas red, rhodamine, green fluorescent protein, and the like), radiolabels (e.g., 3H, 125I, 35S, 14C, or 32P), enzymes (e.g., horse radish peroxidase, alkaline phosphatase and others commonly used in an ELISA), and colorimetric labels such as colloidal gold or colored glass or plastic (e.g., polystyrene, polypropylene, latex, etc.) beads. Preferably, the polynucleotide probes are immobilized on a substrate.

[0119] In one embodiment, the polynucleotide probes are hybridizable array elements in a microarray or high density array. Nucleic acid arrays are well known in the art and are described for use in comparing expression levels of particular genes of interest, for example, in U.S. Pat. No. 6,177,248, which is incorporated herein by reference in its entirety. Nucleic acid arrays are suitable for quantifying a small variations in expression levels of a gene in the presence of a large population of heterogeneous nucleic acids. Knowing the identity of the genes of the present invention, nucleic acid arrays can be fabricated either by de novo synthesis on a substrate or by spotting or transporting nucleic acid sequences onto specific locations of substrate. Nucleic acids are purified and/or isolated from biological materials, such as a bacterial plasmid containing a cloned segment of sequence of interest. It is noted that all of the genes identified by the present invention have been previously sequenced, at least in part, such that oligonucleotides suitable for the identification of such nucleic acids can be produced. The database accession number for each of the genes identified by the present inventors is provided in Table 1. Suitable nucleic acids are also produced by amplification of template, such as by polymerase chain reaction or in vitro transcription.

[0120] Synthesized oligonucleotide arrays are particularly preferred for this aspect of the invention. Oligonucleotide arrays have numerous advantages, as opposed to other methods, such as efficiency of production, reduced intra- and inter array variability, increased information content and high signal-to-noise ratio.

[0121] One of skill in the art will appreciate that an enormous number of array designs are suitable for the practice of this invention. An array will typically include a number of probes that specifically hybridize to the sequences of interest. In addition, in a preferred embodiment, the array will include one or more control probes. The high-density array chip includes “test probes.” Test probes could be oligonucleotides that range from about 5 to about 45 or 5 to about 500 nucleotides (including any whole number increment in between), more preferably from about 10 to about 40 nucleotides and most preferably from about 15 to about 40 nucleotides in length. In other particularly preferred embodiments the probes are 20 or 25 nucleotides in length. In another preferred embodiments, test probes are double or single strand DNA sequences. DNA sequences are isolated or cloned from natural sources or amplified from natural sources using natural nucleic acids as templates, or produced synthetically. These probes have sequences complementary to particular subsequences of the genes whose expression they are designed to detect. Thus, the test probes are capable of specifically hybridizing to the target nucleic acid they are to detect.

[0122] Another embodiment of the present invention relates to a plurality of antibodies, or antigen binding fragments thereof, for the detection of the expression of genes according to the present invention. The plurality of antibodies, or antigen binding fragments thereof, consists of antibodies, or antigen binding fragments thereof, that selectively bind to proteins encoded by genes described herein. According to the present invention, a plurality of antibodies, or antigen binding fragments thereof, refers to at least 2, and more preferably at least 3, and more preferably at least 4, and more preferably at least 5, and more preferably at least 6, and more preferably at least 7, and more preferably at least 8, and more preferably at least 9, and more preferably at least 10, and so on, in increments of one, up to any suitable number of antibodies, or antigen binding fragments thereof, including at least 100, 500, or at least 1000 antibodies, or antigen binding fragments thereof.

[0123] The invention also extends to non-antibody polypeptides, sometimes referred to as binding partners or antigen binding peptides, that have been designed to bind specifically to, and either activate or inhibit as appropriate, a target protein. Examples of the design of such polypeptides, which possess a prescribed ligand specificity are given in Beste et al. (Proc. Natl. Acad. Sci. 96:1898-1903, 1999), incorporated herein by reference in its entirety.

[0124] Limited digestion of an immunoglobulin with a protease may produce two fragments. An antigen binding fragment is referred to as an Fab, an Fab′, or an F(ab′)₂ fragment. A fragment lacking the ability to bind to antigen is referred to as an Fc fragment. An Fab fragment comprises one arm of an immunoglobulin molecule containing a L chain (VL+CL domains) paired with the VH region and a portion of the Ch region (CHI domain). An Fab′ fragment corresponds to an Fab fragment with part of the hinge region attached to the CHI domain. An F(ab′)₂ fragment corresponds to two Fab′ fragments that are normally covalently linked to each other through a di-sulfide bond, typically in the hinge regions.

[0125] Isolated antibodies of the present invention can include serum containing such antibodies, or antibodies that have been purified to varying degrees. Whole antibodies of the present invention can be polyclonal or monoclonal. Alternatively, functional equivalents of whole antibodies, such as antigen binding fragments in which one or more antibody domains are truncated or absent (e.g., Fv, Fab, Fab′, or F(ab)₂ fragments), as well as genetically-engineered antibodies or antigen binding fragments thereof, including single chain antibodies or antibodies that can bind to more than one epitope (e.g., bi-specific antibodies), or antibodies that can bind to one or more different antigens (e.g., bi- or multi-specific antibodies), may also be employed in the invention.

[0126] Generally, in the production of an antibody, a suitable experimental animal, such as, for example, but not limited to, a rabbit, a sheep, a hamster, a guinea pig, a mouse, a rat, or a chicken, is exposed to an antigen against which an antibody is desired. Typically, an animal is immunized with an effective amount of antigen that is injected into the animal. An effective amount of antigen refers to an amount needed to induce antibody production by the animal. The animal's immune system is then allowed to respond over a pre-determined period of time. The immunization process can be repeated until the immune system is found to be producing antibodies to the antigen. In order to obtain polyclonal antibodies specific for the antigen, serum is collected from the animal that contains the desired antibodies (or in the case of a chicken, antibody can be collected from the eggs). Such serum is useful as a reagent. Polyclonal antibodies can be further purified from the serum (or eggs) by, for example, treating the serum with ammonium sulfate.

[0127] Monoclonal antibodies may be produced according to the methodology of Kohler and Milstein (Nature 256:495-497, 1975). For example, B lymphocytes are recovered from the spleen (or any suitable tissue) of an immunized animal and then fused with myeloma cells to obtain a population of hybridoma cells capable of continual growth in suitable culture medium. Hybridomas producing the desired antibody are selected by testing the ability of the antibody produced by the hybridoma to bind to the desired antigen.

[0128] Finally, any of the genes of this invention, or their RNA or protein products, can serve as targets for therapeutic strategies. For example, neutralizing antibodies could be directed against one of the protein products of a selected gene, expressed on the surface of a tumor cell. Alternatively, regulatory compounds that regulate (e.g., upregulate or downregulate) the expression and/or biological activity of a target gene (whether the product is intracellular, membrane or secreted), can be identified and/or designed using the genes described herein. For example, in one aspect, a method of using the genes described herein as a target includes the steps of: (a) contacting a test compound with a cell that expresses at least one gene, wherein said gene is selected from any one of the genes comprising, or expressing a transcript comprising, a nucleic acid sequence selected from the group consisting of SEQ ID NOs: 1-197; and (b) identifying compounds, wherein the compounds can include: (i) compounds that increase the expression or activity of the gene or genes in (a), or the proteins encoded thereby, that are correlated with sensitivity to at least one EGFRi; and (ii) compounds that decrease the expression or activity of genes in (a), or the proteins encoded thereby, that are correlated with resistance to the at least one EGFRi. The compounds are thereby identified as having the potential to enhance the efficacy of EGFR inhibitors. In some embodiments, the EGFRi is gefitinib. In some embodiments, the EGFRi is erlotinib. In some embodiments, the EGFRi is lapatinib. In some embodiments, the EGFRi is cetuximab. In some embodiments, the EGFRi is panitumumab. In some embodiments, the EGFRi is nimotuzumab. In some embodiments, the EGFRi is matuzumab.

[0129] The period of contact with the compound being tested can be varied depending on the result being measured, and can be determined by one of skill in the art. As used herein, the term “contact period” refers to the time period during which cells are in contact with the compound being tested. The term “incubation period” refers to the entire time during which cells are allowed to grow prior to evaluation, and can be inclusive of the contact period. Thus, the incubation period includes all of the contact period and may include a further time period during which the compound being tested is not present but during which expression of genes is allowed to continue prior to scoring. Methods to evaluate gene expression in a cell according to the present invention have been described previously herein.

[0130] If a suitable therapeutic compound is identified using the methods and genes of the present invention, a composition can be formulated. A composition, and particularly a therapeutic composition, of the present invention generally includes the therapeutic compound and a carrier, and preferably, a pharmaceutically acceptable carrier. According to the present invention, a “pharmaceutically acceptable carrier” includes pharmaceutically acceptable excipients and/or pharmaceutically acceptable delivery vehicles, which are suitable for use in administration of the composition to a suitable in vitro, ex vivo or in vivo site. A suitable in vitro, in vivo or ex vivo site is preferably a rumor cell. In some embodiments, a suitable site for delivery is a site of inflammation, near the site of a tumor, or a site of any other disease or condition in which regulation of the genes identified herein can be beneficial. Preferred pharmaceutically acceptable carriers are capable of maintaining a compound, a protein, a peptide, nucleic acid molecule or mimetic (drag) according to the present invention in a form that, upon arrival of the compound, protein, peptide, nucleic acid molecule or mimetic at the cell target in a culture or in patient, the compound, protein, peptide, nucleic acid molecule or mimetic is capable of interacting with its target.

[0131] Suitable excipients of the present invention include excipients or formularies that transport or help transport, but do not specifically target a composition to a cell (also referred to herein as non-targeting carriers). Examples of pharmaceutically acceptable excipients include, but are not limited to water, phosphate buffered saline, Ringer's solution, dextrose solution, serum-containing solutions, Hank's solution, other aqueous physiologically balanced solutions, oils, esters and glycols. Aqueous carriers can contain suitable auxiliary substances required to approximate the physiological conditions of the recipient, for example, by enhancing chemical stability and isotonicity.

[0132] Suitable auxiliary substances include, for example, sodium acetate, sodium chloride, sodium lactate, potassium chloride, calcium chloride, and other substances used to produce phosphate buffer, Tris buffer, and bicarbonate buffer. Auxiliary substances can also include preservatives, such as thimerosal, m- or o-cresol, formalin and benzol alcohol. Compositions of the present invention can be sterilized by conventional methods and/or lyophilized.

[0133] One type of pharmaceutically acceptable carrier includes a controlled release formulation that is capable of slowly releasing a composition of the present invention into a patient or culture. As used herein, a controlled release formulation comprises a compound of the present invention (e.g., a protein (including homologues), a drug, an antibody, a nucleic acid molecule, or a mimetic) in a controlled release vehicle. Suitable controlled release vehicles include, but are not limited to, biocompatible polymers, other polymeric matrices, capsules, microcapsules, microparticles, bolus preparations, osmotic pumps, diffusion devices, liposomes, lipospheres, and transdermal delivery systems. Other carriers of the present invention include liquids that, upon administration to a patient, form a solid or a gel in situ. Preferred carriers are also biodegradable (i.e., bioerodible). When the compound is a recombinant nucleic acid molecule, suitable delivery vehicles include, but are not limited to liposomes, viral vectors or other delivery vehicles, including ribozymes. Natural lipid-containing delivery vehicles include cells and cellular membranes. Artificial lipid-containing delivery vehicles include liposomes and micelles. A delivery vehicle of the present invention can be modified to target to a particular site in a patient, thereby targeting and making use of a compound of the present invention at that site. Suitable modifications include manipulating the chemical formula of the lipid portion of the delivery vehicle and/or introducing into the vehicle a targeting agent capable of specifically targeting a delivery vehicle to a preferred site, for example, a preferred cell type. Other suitable delivery vehicles include gold particles, poly-L-lysine/DNA-molecular conjugates, and artificial chromosomes.

[0134] A pharmaceutically acceptable carrier which is capable of targeting is herein referred to as a “delivery vehicle.” Delivery vehicles of the present invention are capable of delivering a composition of the present invention to a target site in a patient. A “target site” refers to a site in a patient to which one desires to deliver a composition. For example, a target site can be any cell which is targeted by direct injection or delivery using liposomes, viral vectors or other delivery vehicles, including ribozymes and antibodies. Examples of delivery vehicles include, but are not limited to, artificial and natural lipid-containing delivery vehicles, viral vectors, and ribozymes. Natural lipid-containing delivery vehicles include cells and cellular membranes. Artificial lipid-containing delivery vehicles include liposomes and micelles. A delivery vehicle of the present invention can be modified to target to a particular site in a subject, thereby targeting and making use of a compound of the present invention at that site. Suitable modifications include manipulating the chemical formula of the lipid portion of the delivery vehicle and/or introducing into the vehicle a compound capable of specifically 5 targeting a delivery vehicle to a preferred site, for example, a preferred cell type. Specifically, targeting refers to causing a delivery vehicle to bind to a particular cell by the interaction of the compound in the vehicle to a molecule on the surface of the cell. Suitable targeting compounds include ligands capable of selectively (i.e., specifically) binding another molecule at a particular site. Examples of such ligands include antibodies, antigens, receptors and receptor ligands. Manipulating the chemical formula of the lipid portion of the delivery vehicle can modulate the extracellular or intracellular targeting of the delivery vehicle. For example, a chemical can be added to the lipid formula of a liposome that alters the charge of the lipid bilayer of the liposome so that the liposome fuses with particular cells having particular charge characteristics.

[0135] Another preferred delivery vehicle comprises a viral vector. A viral vector includes an isolated nucleic acid molecule useful in the present invention, in which the nucleic acid molecules are packaged in a viral coat that allows entrance of DNA into a cell. A number of viral vectors can be used, including, but not limited to, those based on alphaviruses, poxviruses, adenoviruses, herpesviruses, lentiviruses, adeno-associated viruses and retroviruses.

[0136] A composition can be delivered to a cell culture or patient by any suitable method. Selection of such a method will vary with the type of compound being administered or delivered (i.e., compound, protein, peptide, nucleic acid molecule, or mimetic), the mode of delivery (i.e., in vitro, in vivo, ex vivo) and the goal to be achieved by administration/delivery of the compound or composition. According to the present invention, an effective administration protocol (i.e., administering a composition in an effective manner) comprises suitable dose parameters and modes of administration that result in delivery of a composition to a desired site (i.e., to a desired cell) and/or in the desired regulatory event.

[0137] Administration routes include in vivo, in vitro and ex vivo routes. In vivo routes include, but are not limited to, oral, nasal, intratracheal injection, inhaled, transdermal, rectal, and parenteral routes. Preferred parenteral routes can include, but are not limited to, subcutaneous, intradermal, intravenous, intramuscular and intraperitoneal routes.

[0138] Intravenous, intraperitoneal, intradermal, subcutaneous and intramuscular administrations can be performed using methods standard in the art. Aerosol (inhalation) delivery can also be performed using methods standard in the art (see, for example, Stribling et al., Proc. Natl. Acad. Sci. USA 189:11277-11281, 1992, which is incorporated herein by reference in its entirety). Oral delivery can be performed by complexing a therapeutic composition of the present invention to a carrier capable of withstanding degradation by digestive enzymes in the gut of an animal. Examples of such carriers, include plastic capsules or tablets, such as those known in the art. Direct injection techniques are particularly useful for suppressing graft rejection by, for example, injecting the composition into the transplanted tissue, or for site-specific administration of a compound, such as at the site of a tumor. Ex vivo refers to performing part of the regulatory step outside of the patient, such as by transfecting a population of cells removed from a patient with a recombinant molecule comprising a nucleic acid sequence encoding a protein according to the present invention under conditions such that the recombinant molecule is subsequently expressed by the transfected cell, and returning the transfected cells to the patient. In vitro and ex vivo routes of administration of a composition to a culture of host cells can be accomplished by a method including, but not limited to, transfection, transformation, electroporation, microinjection, lipofection, adsorption, protoplast fusion, use of protein carrying agents, use of ion carrying agents, use of detergents for cell permeabilization, and simply mixing (e.g., combining) a compound in culture with a target cell.

[0139] In the method of the present invention, a therapeutic compound, as well as compositions comprising such compounds, can be administered to any organism, and particularly, to any member of the Vertebrate class, Mammalia, including, without limitation, primates, rodents, livestock and domestic pets. Livestock include mammals to be consumed or that produce useful products (e.g., sheep for wool production). Preferred mammals to protect include humans. Typically, it is desirable to obtain a therapeutic benefit in a patient. A therapeutic benefit is not necessarily a cure for a particular disease or condition, but rather, preferably encompasses a result which can include alleviation of the disease or condition, elimination of the disease or condition, reduction of a symptom associated with the disease or condition, prevention or alleviation of a secondary disease or condition resulting from the occurrence of a primary disease or condition, and/or prevention of the disease or condition. As used herein, the phrase “protected from a disease” refers to reducing the symptoms of the disease; reducing the occurrence of the disease, and/or reducing the severity of the disease. Protecting a patient can refer to the ability of a composition of the present invention, when administered to a patient, to prevent a disease from occurring and/or to cure or to alleviate disease symptoms, signs or 5 causes. As such, to protect a patient from a disease includes both preventing disease occurrence (prophylactic treatment) and treating a patient that has a disease (therapeutic treatment) to reduce the symptoms of the disease. A beneficial effect can easily be assessed by one of ordinary skill in the art and/or by a trained clinician who is treating the patient. The term, “disease” refers to any deviation from the normal health of a mammal 10 and includes a state when disease symptoms are present, as well as conditions in which a deviation (e.g., infection, gene mutation, genetic defect, etc.) has occurred, but symptoms are not yet manifested.

### Kits

[0140] The present application concerns kits for use with the compounds described herein. In some embodiments, the invention provides a kit including an EGFR inhibitor in a dosage form, especially a dosage form for oral administration. In some embodiments, the kit further includes a ZEB1 and/or SIP1 inhibitor in a dosage form, especially a dosage form for oral administration. In specific embodiments, the EGFR inhibitor and ZEB1 and/or SIP1 inhibitor are in separate dosage forms. In some embodiments of the invention, the kit includes one or more doses of an EGFR inhibitor in tablets for oral administration. In other embodiments, however, the dose or doses an EGFR inhibitor may be present in a variety of dosage forms, such as capsules, caplets, gel caps, powders for suspension, etc. In some embodiments, the kit includes a liquid dosage form for the EGFR inhibitor. In some embodiments the EGFR inhibitor is in a dosage form suitable for intravenous delivery or dosage. In some embodiments of the invention, the kit includes one or more doses of an EGFR inhibitor in tablets for oral administration. In other embodiments, however, the dose or doses of an EGFR inhibitor may be present in a variety of dosage forms, such as capsules, caplets, gel caps, powders for suspension, etc.

[0141] In some embodiments, a kit according to the invention includes at least three dosage forms, one comprising an EGFR inhibitor, one comprising a ZEB1 and/or SIP1 inhibitor and the other comprising at least a third active pharmaceutical ingredient, other than the EGFR inhibitor and the ZEB1 and/or SIP1 inhibitor pharmaceutical ingredient. In some embodiments, the third active pharmaceutical ingredient is a second EGFR inhibitor. In other embodiments, the third active pharmaceutical ingredient is a second ZEB1 and/or SIP1 inhibitor. In some embodiments, the kit includes sufficient doses for a period of time. In particular embodiments, the kit includes a sufficient dose of each active pharmaceutical ingredient for a day, a week, 14 days, 28 days, 30 days, 90 days, 180 days, a year, etc. It is considered that the most convenient periods of time for which such kits are designed would be from 1 to 13 weeks, especially 1 week, 2 weeks, 1 month, 3 months, etc. In some specific embodiments, the each dose is physically separated into a compartment, in which each dose is segregated from the others.

[0142] In some embodiments, the kit according to the invention includes at least two dosage forms one comprising an EGFR inhibitor and one comprising an ZEB1 and/or SIP1 inhibitor. In some embodiments, the kit according to the invention includes at least two dosage forms where one comprises an EGFR inhibitor and the other comprises at least a second dosage form of an active pharmaceutical ingredient, other than the EGFR inhibitor. In some embodiments, the kit according to the invention includes at least two dosage forms comprising two different EGFR inhibitors. In some embodiments, the kit includes sufficient doses for a period of time. In particular embodiments, the kit includes a sufficient dose of each active pharmaceutical ingredient for a day, a week, 14 days, 28 days, 30 days, 90 days, 180 days, a year, etc. In some specific embodiments, the each dose is physically separated into a compartment, in which each dose is segregated from the others.

[0143] In some embodiments, the kit according to the invention includes at least one dosage form comprising at least one EGFR inhibitor. In some embodiments, the kit includes sufficient doses for a period of time. In particular embodiments, the kit includes a sufficient dose of each active pharmaceutical ingredient for a day, a week, 14 days, 28 days, 30 days, 90 days, 180 days, a year, etc. In some specific embodiments, the each dose is physically separated into a compartment, in which each dose is segregated from the others.

[0144] In particular embodiments, the kit may advantageously be a blister pack. Blister packs are known in the art, and generally include a clear side having compartments (blisters or bubbles), which separately hold the various doses, and a backing, such as a paper, foil, paper-foil or other backing, which is easily removed so that each dose may be separately extracted from the blister pack without disturbing the other doses. In some embodiments, the kit may be a blister pack in which each dose of the EGFR inhibitor, the ZEB1 and/or SIP1 inhibitor and, optionally, a third active pharmaceutical ingredient are segregated from the other doses in separate blisters or bubbles. In some such embodiments, the blister pack may have perforations, which allow each daily dose to be separated from the others by tearing it away from the rest of the blister pack. The separate dosage forms may be contained within separate blisters. Segregation of the active pharmaceutical ingredients into separate blisters can be advantageous in that it prevents separate dosage forms (e.g., tablet and capsule) from contacting and damaging one another during shipping and handling. Additionally, the separate dosage forms can be accessed and/or labeled for administration to the patient at different times.

[0145] In some embodiments, the kit may be a blister pack in which each separate dose the EGFR inhibitor, the ZEB1 and/or SIP1 inhibitor and, optionally, a third active pharmaceutical ingredient is segregated from the other doses in separate blisters or bubbles. In another embodiment, the kit includes two different EGFR inhibitors and, optionally, a third active pharmaceutical ingredient. In some such embodiments, the blister pack may have perforations, which allow each daily dose to be separated from the others by tearing it away from the rest of the blister pack. The separate dosage forms may be contained within separate blisters.

[0146] In some embodiments, one or more of the active pharmaceutical ingredients may be in the form of a liquid or a reconstitutable powder, which may be separately sealed (e.g., in a vial or ampoule) and then packaged along with a blister pack containing separate dosages of the EGFR inhibitor and the ZEB1 and/or SIP1 inhibitor. In some embodiments, the EGFR inhibitor is in the form of a liquid or reconstitutable powder that is separately sealed (e.g., in a vial or ampoule). In some embodiments, the EGFR inhibitor is in the form of a liquid or reconstitutable powder that is separately sealed (e.g., in a vial or ampoule) and then packaged along with a blister pack containing separate dosages of the ZEB1 and/or SIP1 inhibitor. These embodiments would be especially useful in a clinical setting where prescribed doses of the EGFR inhibitor, ZEB1 and/or SIP1 inhibitor and, optionally, a third active pharmaceutically active agent would be used on a dosing schedule in which the ZEB1 and/or SIP1 inhibitor is administered on certain days, the EGFR inhibitor is administered on the same or different days and the third active pharmaceutical ingredient is administered on the same or different days from either or both of the ZEB1 and/or SIP1 and/or EGFR inhibitors within a weekly, bi-weekly, 2× weekly or other dosing schedule. Such a combination of blister pack containing an EGFR inhibitor, a ZEB1 and/or SIP1 inhibitor and an optional third active pharmaceutical agent could also include instructions for administering each of the EGFR inhibitor, a ZEB1 and/or SIP1 inhibitor and the optional third active pharmaceutical agent on a dosing schedule adapted to provide the synergistic treating effect of the EGFR inhibitor and/or the third active pharmaceutical agent.

[0147] In other embodiments, the kit may be a container having separate compartments with separate lids adapted to be opened on a particular schedule. For example, a kit may comprise a box (or similar container) having seven compartments, each for a separate day of the week, and each compartment marked to indicate which day of the week it corresponds to. In some specific embodiments, each compartment is further subdivided to permit segregation of one active pharmaceutical ingredient from another. As stated above, such segregation is advantageous in that it prevents damage to the dosage forms and permits dosing at different times and labeling to that effect. Such a container could also include instructions for administering an EGFR inhibitor, a ZEB1 and/or SIP1 inhibitor and the optional third active pharmaceutical ingredient on a dosing schedule adapted to provide the synergistic treating effect of the EGFR inhibitor and/or the third active pharmaceutical ingredient.

[0148] In some embodiments, wherein the packaging material further comprises a container for housing the pharmaceutical composition, the kit comprises an EGFR inhibitor composition that is in a different physical location within the kit from a ZEB1 and/or SIP1 inhibitor composition. In further embodiments, the kit comprises a third pharmaceutical agent that is in a separate physical location from either the EGFR inhibitor composition or the ZEB1 and/or SIP1 inhibitor composition. In some embodiments, the different physical locations of ZEB1 and/or SIP1 inhibitor composition and the EGFR inhibitor composition comprise separately sealed individual compartments. In certain embodiments, the kit comprises an EGFR inhibitor composition that is in a first separately sealed individual compartment and a ZEB1 and/or SIP1 inhibitor composition that is in a second separately sealed individual compartment. In embodiments wherein the EGFR inhibitor composition and ZEB1 and/or SIP1 inhibitor composition compartments are separate, the different locations are used, e.g., to distinguish between the ZEB1 and/or SIP1 inhibitor composition and EGFR inhibitor compositions. In further embodiments, a third pharmaceutical composition is in a third physical location within the kit.

[0149] The container means of the kits will generally include at least one vial, test tube, flask, bottle, syringe and/or other container means, into which the at least one polypeptide can be placed, and/or preferably, suitably aliquoted. The kits can include a means for containing at least one detectable moiety, reporter molecule, and/or any other reagent containers in close confinement for commercial sale. Such containers may include injection and/or blow-molded plastic containers in which the desired vials are stored. Kits can also include printed material for use of the materials in the kit.

[0150] Packages and kits can additionally include a buffering agent, a preservative and/or a stabilizing agent in a pharmaceutical formulation. Each component of the kit can be enclosed within an individual container and all of the various containers can be within a single package. Invention kits can be designed for cold storage or room temperature storage.

[0151] Additionally, the preparations can contain stabilizers (such as bovine serum albumin (BSA)) to increase the shelf-life of the kits. Where the compositions are lyophilized, the kit can contain further preparations of solutions to reconstitute the lyophilized preparations. Acceptable reconstitution solutions are well known in the art and include, for example, pharmaceutically acceptable phosphate buffered saline (PBS).

[0152] Additionally, the packages or kits provided herein can further include any of the other moieties provided herein such as, for example, one or more reporter molecules and/or one or more detectable moieties/agents.

[0153] Packages and kits can further include one or more components for an assay, such as, for example, an ELISA assay, cytotoxicity assay, etc. Samples to be tested in this application include, for example, blood, plasma, and tissue sections and secretions, urine, lymph, and products thereof. Packages and kits can further include one or more components for collection of a sample (e.g., a syringe, a cup, a swab, etc.).

[0154] Packages and kits can further include a label specifying, for example, a product description, mode of administration and/or indication of treatment. Packages provided herein can include any of the compositions as described herein for treatment of any of the indications described herein.

[0155] The term “packaging material” refers to a physical structure housing the components of the kit. The packaging material can maintain the components sterilely, and can be made of material commonly used for such purposes (e.g., paper, corrugated fiber, glass, plastic, foil, ampules, etc.). The label or packaging insert can include appropriate written instructions. Kits, therefore, can additionally include labels or instructions for using the kit components in any method of the invention. A kit can include a compound in a pack, or dispenser together with instructions for administering the compound in a method described herein.

[0156] The kits may also include instructions teaching the use of the kit according to the various methods and approaches described herein. Such kits optionally include information, such as scientific literature references, package insert materials, clinical trial results, and/or summaries of these and the like, which indicate or establish the activities and/or advantages of the composition, and/or which describe dosing, administration, side effects, drug interactions, disease state for which the composition is to be administered, or other information useful to the health care provider. Such information may be based on the results of various studies, for example, studies using experimental animals involving in vivo models and studies based on human clinical trials. In various embodiments, the kits described herein can be provided, marketed and/or promoted to health providers, including physicians, nurses, pharmacists, formulary officials, and the like. Kits may, in some embodiments, be marketed directly to the consumer. In certain embodiments, the packaging material further comprises a container for housing the composition and optionally a label affixed to the container. The kit optionally comprises additional components, such as but not limited to syringes for administration of the composition.

[0157] Instructions can include instructions for practicing any of the methods described herein including treatment methods. Instructions can additionally include indications of a satisfactory clinical endpoint or any adverse symptoms that may occur, or additional information required by regulatory agencies such as the Food and Drug Administration for use on a human subject.

[0158] The instructions may be on “printed matter,” e.g., on paper or cardboard within or affixed to the kit, or on a label affixed to the kit or packaging material, or attached to a vial or tube containing a component of the kit. Instructions may additionally be included on a computer readable medium, such as a disk (floppy diskette or hard disk), optical CD such as CD- or DVD-ROM/RAM, magnetic tape, electrical storage media such as RAM and ROM, IC tip and hybrids of these such as magnetic/optical storage media.

[0159] The invention thus provides kits which utilize the diagnostic methods and assays described herein. In some embodiments, a kit according to the invention comprises reagents for the detection of a gene or genes whose expression levels have been correlated with sensitivity or resistance to an EGFR inhibitor in a sample of cancer cells from a patient. In some embodiments, the gene or genes are selected from E-cadherin, ErbB3 (Hera), RAB25, integrin beta 6, cadherein-2 (N-cadherin), fibroblast growth factor binding protein 1, distal-less homeo box 1, vimentin, ZEB1, and SIP1. In some embodiments, the kit comprises E-cadherin. In some embodiments, the kit comprises ErbB3. In some embodiments, the kit comprises RAB25. In some embodiments, the kit comprises integrin beta 6. In some embodiments, the kit comprises cadherin-2. In some embodiments, the kit comprises fibroblast growth factor binding protein 1. In some embodiments, the kit comprises distal-less homeo box 1. In some embodiments, the kit comprises vimentin. In some embodiments, the kit comprises ZEB1. In some embodiments, the kit comprises SIP1. In some embodiments, the kit comprises at least two of E-cadherin, ErbB3 (Her3), RAB25, integrin beta 6, cadherein-2 (N-cadherin), fibroblast growth factor binding protein 1, distal-less homeo box 1, vimentin, ZEB1, and SIP1. In some embodiments, the kit comprises at least two genes that have been correlated with sensitivity to an EGFRi. In some embodiments, the kit comprises at least two genes that have been correlated with resistance to an EGFRi. In some embodiments, the kit comprises at least one gene that has been correlated with sensitivity to an EGFRi and on gene that has been correlated with resistance to an EGFRi.

[0160] In still further embodiments, a kit according to the invention comprises reagents for the detection of E-cadherin, ErbB3 (Her3), RAB25, integrin beta 6, cadherein-2 (N-cadherin), fibroblast growth factor binding protein 1, distal-less homeo box 1, vimentin, ZEB1, and SIP1 expression levels in a sample of tumor cells from a patient to be treated; and a dose or doses an EGFR inhibitor in a variety of dosage forms, such as capsules, caplets, gel caps, powders for suspension, etc. It is further contemplated within the invention that kit comprising reagents for the detection of E-cadherin, ErbB3 (Her3), RAB25, integrin beta 6, cadherein-2 (N-cadherin), fibroblast growth factor binding protein 1, distal-less homeo box 1, vimentin, ZEB1, and SIP1 expression levels in a sample of tumor cells from a patient to be treated will further comprise any of the aforementioned embodiments of the kits for co-administration of the EGFR inhibitor. In some embodiments, the kit comprises E-cadherin. In some embodiments, the kit comprises ErbB3. In some embodiments, the kit comprises RAB25. In some embodiments, the kit comprises integrin beta 6. In some embodiments, the kit comprises cadherin-2. In some embodiments, the kit comprises fibroblast growth factor binding protein 1. In some embodiments, the kit comprises distal-less homeo box 1. In some embodiments, the kit comprises vimentin. In some embodiments, the kit comprises ZEB1. In some embodiments, the kit comprises SIP1. In some embodiments, the kit comprises at least two of E-cadherin, ErbB3 (Her3), RAB25, integrin beta 6, cadherein-2 (N-cadherin), fibroblast growth factor binding protein 1, distal-less homeo box 1, vimentin, ZEB1, and SIP1. In some embodiments, the kit comprises at least two genes that have been correlated with sensitivity to an EGFRi. In some embodiments, the kit comprises at least two genes that have been correlated with resistance to an EGFRi. In some embodiments, the kit comprises at least one gene that has been correlated with sensitivity to an EGFRi and on gene that has been correlated with resistance to an EGFRi.

[0161] Kits can, in some aspects, contain reagents and materials to conduct any of the assays described herein.

[0162] It is understood that the kits provided by the invention and described herein can include any of the embodiments for the detection of genes as described herein. It is also understood that the kits can include any of the embodiments for the correlation of resistance or sensitivity to any of the EGFR inhibitors as described herein. Finally, it is understood that the kits can also include any of the embodiments for the detection of genes and correlation of sensitivity or resistance to EGFR inhibitors in any of the cancers as described herein.

[0163] In some embodiments, the gene detected is E-cadherin. In some embodiments, the gene detected is RAB25. In some embodiments, the gene detected is integrin beta 6. In some embodiments, the gene detected is vimentin. In some embodiments, the gene detected is ZEB1. In some embodiments, the gene detected is SIP1. In still further embodiments, the gene or genes detected are E-cadherein, ZEB1 and SIP1. In further embodiments, the gene or genes detected are E-cadherin, RAB25, and integrin beta 6. In additional embodiments, the genes detected are ZEB1 and vimentin. Additional combinations of the genes described herein are useful in additional embodiments of the kits of the invention and are contemplated herein.

[0164] Various aspects of the invention are described in the following examples; however, the following examples are provided for the purpose of illustration and are not intended to limit the scope of the present invention.

### EXAMPLES

### Example 1

[0165] The following example describes the identification of a biomarker panel that discriminates EGFR inhibitor-sensitive cell lines from EGFR inhibitor-resistant cell lines.

[0166] Methods: EGFR inhibitor sensitivity is determined in 18 NSCLC cell lines using MTT assays. Cell lines are classified as EGFR inhibitor sensitive (IC₅₀<1 μM), resistant (IC₅₀>10 μM) or intermediate sensitivity (10 μM<IC₅₀>1). Oligonucleotide gene arrays (Affymetrix® Human Genome U133 set, 39,000 genes) are done on 10 cell lines. Three distinct filtration and normalization algorithms to process the expression data are used, and a list of genes is generated that is both statistically significant (unadjusted p=0.001 cutoff) and corrected for false positive occurrence. This approach is used in combination with 5 distinct machine learning algorithms used to build a test set for predictor genes that are successful for 100% of the test cases. The best discriminators (>3 fold difference in expression between sensitive and resistant cell lines) are selected for Real-time RT-PCR.

[0167] Results: A list of genes is generated initially from the Affymetrix array analysis. By using the mathematical algorithm, 10-30 different candidate genes are selected for RT-PCR.

[0168] Conclusion: Based on NSCLC cell line studies it is possible to identify genes which strongly discriminate EGFR inhibitor sensitive cell lines (Table 1-Sensitive) from the EGFR inhibitor resistant cell lines (Table 1-Resistant). The genes are ranked in Table 1. This entire biomarker panel is of significant value for selecting NSCLC patients for EGFR inhibitor treatment.

TABLE 1

| | | | | |
|---|---|---|---|---|
| Probe | parametric | Gene | Sequence | |
| set | p-value | symbol | Identifier | Description |

Sensitive

| | | | | |
|---|---|---|---|---|
| 202286 s | 0.00000005 | TACSTD2 | SEQ ID | tumor-associated calcium signal transducer 2 |
| at | | | NO: 12 | |
| 202489_s_at | 0.00000005 | FXYD3 | SEQ ID | FXYD domain containing ion transport regulator 3 |
| | | | NO: 16 | |
| 213285 | 0.00000005 | TMEM30B | SEQ ID | transmembrane protein 30B |
| at | | | NO: 73 | |
| 218186 | 0.00000005 | RAB25 | SEQ ID | RAB25, member RAS oncogene family |
| at | | | NO: 83 | |
| 235515 | 0.00000005 | FLJ36445 | SEQ ID | hypothetical protein FLJ36445 |
| at | | | NO: 168 | |
| 235988 | 0.00000005 | GPR110 | SEQ ID | G protein-coupled receptor 110 |
| at | | | NO: 170 | |
| 238689 | 0.00000005 | GPR110 | SEQ ID | G protein-coupled receptor 110 |
| at | | | NO: 177 | |
| 232165 | 0.00000010 | EPPK1 | SEQ ID | epiplakin 1 |
| at | | | NO: 164 | |
| 240633 | 0.00000010 | FLJ33718 | SEQ ID | hypothetical protein FLJ33718 |
| at | | | NO: 182 | |
| 229599_at | 0.00000020 | | SEQ ID | Clone IMAGE: 5166045, Mrna |
| | | | NO: 154 | |
| 203397_s_at | 0.00000030 | GALNT3 | SEQ ID | UDP-N-acetyl-alpha-D-galactosamine:polypeptide |
| | | | NO: 28 | N-acetylgalactosaminyltransferase 3 (GalNAc-T3) |
| 232164 s | 0.00000030 | EPPK1 | SEQ ID | epiplakin 1 |
| at | | | NO: 163 | |
| 227134 | 0.00000160 | SYTL1 | SEQ ID | synaptotagmin-like 1 |
| at | | | NO: 143 | |
| 236489 | 0.00000170 | | SEQ ID | |
| at | | | NO: 171 | |
| 235651 | 0.00000480 | | SEQ ID | |
| at | | | NO: 169 | |
| 238439 | 0.00000700 | ANKRD22 | SEQ ID | ankyrin repeat domain 22 |
| at | | | NO: 173 | |
| 219388 | 0.00000730 | TFCP2L3 | SEQ ID | transcription factor CP2-like 3 |
| at | | | NO: 91 | |
| 227985 | 0.00000820 | | SEQ ID | |
| at | | | NO: 146 | |
| 227450 | 0.00000890 | FLJ32115 | SEQ ID | hypothetical protein FLJ32115 |
| at | | | NO: 144 | |
| 203256 | 0.00000980 | CDH3 | SEQ ID | cadherin 3, type 1, P-cadherin (placental) |
| at | | | NO: 23 | |
| 220318 | 0.00000980 | EPN3 | SEQ ID | epsin 3 |
| at | | | NO: 100 | |
| 202525 | 0.00001030 | PRSS8 | SEQ ID | protease, serine, 8 (prostasin) |
| at | | | NO: 17 | |
| 227803_at | 0.00001080 | ENPP5 | SEQ ID | ectonudeotide pyrophosphatase/phosphodiesterase 5 |
| | | | NO: 145 | (putative function) |
| 206884 s | 0.00001200 | SCEL | SEQ ID | Sciellin |
| at | | | NO: 49 | |
| 223895 s | 0.00001290 | EPN3 | SEQ ID | epsin 3 |
| at | | | NO: 119 | |
| 238493 | 0.00001650 | ZNF506 | SEQ ID | zinc finger protein 506 |
| at | | | NO. 174 | |
| 201428 | 0.00002330 | CLDN4 | SEQ ID | claudin 4 |
| at | | | NO: 5 | |
| 216641 s | 0.00003760 | LAD1 | SEQ ID | ladinin 1 |
| at | | | NO: 78 | |
| 231929_at | 0.00003910 | | SEQ ID | MRNA; cDNA DKFZp586O0724 (from clone |
| | | | NO: 159 | DKFZp586O0724) |
| 238778_at | 0.00004080 | MPP7 | SEQ ID | membrane protein, palmitoylated 7 (MAGUK p55 |
| | | | NO: 178 | subfamily member 7) |
| 203287 | 0.00004920 | LAD1 | SEQ ID | ladinin 1 |
| at | | | NO: 24 | |
| 209114 | 0.00005560 | TSPAN-1 | SEQ ID | tetraspan 1 |
| at | | | NO: 57 | |
| 230076 | 0.00005660 | | SEQ ID | |
| at | | | NO: 155 | |
| 218677 | 0.00005710 | S100A14 | SEQ ID | S100 calcium binding protein A14 |
| at | | | NO: 85 | |
| 236616 | 0.00005810 | | SEQ ID | CDNA FLJ41623 fis, clone CTONG3009227 |
| at | | | NO: 172 | |
| 205014 | 0.00006280 | FGFBP1 | SEQ ID | fibroblast growth factor binding protein 1 |
| at | | | NO: 40 | |
| 90265 at | 0.00007110 | CENTA1 | SEQ ID | centaurin, alpha 1 |
| | | | NO: 193 | |
| 226403 | 0.00007930 | TMC4 | SEQ ID | transmembrane channel-like 4 |
| at | | | NO: 136 | |
| 232056 | 0.00008450 | SCEL | SEQ ID | Scieliin |
| at | | | NO: 160 | |
| 207655 s | 0.00008700 | BLNK | SEQ ID | B-cell linker |
| at | | | NO: 51 | |
| 204160_s_at | 0.00009570 | ENPP4 | SEQ ID | Ectonucleotide pyrophosphatase/phosphodiesterase 4 |
| | | | NO: 36 | (putative function) |
| 202454_s_at | 0.00009860 | ERBB3 | SEQ ID | v-erb-b2 erythroblastic leukemia viral oncogene |
| | | | NO: 15 | homolog 3 (avian) |
| 232151_at | 0.00010020 | | SEQ ID | MRNA full length insert cDNA clone |
| | | | NO: 162 | EUROIMAGE 2344436 |
| 205073_at | 0.00010350 | CYP2J2 | SEQ ID | cytochrome P450, family 2, subfamily J, polypeptide 2 |
| | | | NO: 41 | |
| 225658 | 0.00011660 | LOC339745 | SEQ ID | hypothetical protein LOC339745 |
| at | | | NO: 127 | |
| 219150 s | 0.00012240 | CENTA1 | SEQ ID | centaurin, alpha 1 |
| at | | | NO: 90 | |
| 222857_s_at | 0.00012430 | KCNMB4 | SEQ ID | potassium large conductance calcium-activated |
| | | | NO: 113 | channel, subfamily M, beta member 4 |
| 55662 at | 0.00013490 | C10orf76 | SEQ ID | chromosome 10 open reading frame 76 |
| | | | NO: 191 | |
| 204161_s_at | 0.00013900 | ENPP4 | SEQ ID | Ectonucleotide pyrophosphatase/phosphodiesterase 4 |
| | | | NO: 37 | (putative function) |
| 205455_at | 0.00014640 | MST1R | SEQ ID | macrophage stimulating 1 receptor (c-met-related |
| | | | NO: 42 | tyrosine kinase) |
| 235247 | 0.00019200 | | SEQ ID | |
| at | | | NO: 167 | |
| 205617 | 0.00019960 | PRRG2 | SEQ ID | proline rich Gla (G-carboxyglutamic acid) 2 |
| at | | | NO: 44 | |
| 225822 | 0.00020110 | MGC17299 | SEQ ID | hypothetical protein MGC17299 |
| at | | | NO: 129 | |
| 218779 x | 0.00021870 | EPS8L1 | SEQ ID | EPS8-like 1 |
| at | | | NO: 86 | |
| 218792 s | 0.00023140 | BSPRY | SEQ ID | B-box and SPRY domain containing |
| at | | | NO: 87 | |
| 203236_s_at | 0.00025890 | LGALS9 | SEQ ID | 11 lectin, galactoside-binding, soluble, 9 (galectin 9) |
| | | | NO: 22 | |
| 229223 | 0.00026990 | | SEQ ID | |
| at | | | NO: 152 | |
| 226187_at | 0.00027300 | CDS1 | SEQ ID | CDP-diacylglycerol synthase (phosphatidate |
| | | | NO: 132 | cytidylyltransferase) 1 |
| 239671 | 0.00028050 | | SEQ ID | CDNA FLJ31085 fis, clone IMR321000037 |
| at | | | NO: 181 | |
| 222746 s | 0.00028540 | BSPRY | SEQ ID | B-box and SPRY domain containing |
| at | | | NO: 111 | |
| 219858 s | 0.00029160 | FLJ20160 | SEQ ID | FLJ20160 protein |
| at | | | NO: 96 | |
| 210749 x | 0.00029280 | DDR1 | SEQ ID | discoidin domain receptor family, member 1 |
| at | | | NO: 59 | |
| 211778 s | 0.00029620 | ZNF339 | SEQ ID | zinc finger protein 339 /// zinc finger protein 339 |
| at | | | NO: 61 | |
| 230323 s | 0.00033140 | LOC120224 | SEQ ID | hypothetical protein BC016153 |
| at | | | NO: 157 | |
| 221665 s | 0.00033480 | EPS8L1 | SEQ ID | EPS8-like 1 |
| at | | | NO: 105 | |
| 1007 s at | 0.00033840 | DDR1 | SEQ ID | discoidin domain receptor family, member 1 |
| | | | NO: 1 | |
| 218960 | 0.00034100 | TMPRSS4 | SEQ ID | transmembrane protease, serine 4 |
| at | | | NO: 89 | |
| 226213 | 0.00036180 | ERBB3 | SEQ ID | v-erb-b2 erythroblastic leukemia viral oncogene |
| at | | | NO: 133 | homolog 3 (avian) |
| 202597 | 0.00037880 | IRF6 | SEQ ID | interferon regulatory factor 6 |
| at | | | NO: 18 | |
| 228865 | 0.00037970 | SARG | SEQ ID | specifically androgen-regulated protein |
| at | | | NO: 149 | |
| 205709_s_at | 0.00038120 | CDS1 | SEQ ID | CDP-diacylglycerol synthase (phosphatidate |
| | | | NO: 45 | cytidylyltransferase) 1 |
| 224946 s | 0.00039420 | MGC12981 | SEQ ID | hypothetical protein MGC12981 |
| at | | | NO: 123 | |
| 204856_at | 0.00039710 | B3GNT3 | SEQ ID | UDP-GlcNAc:betaGal beta-1,3-N- |
| | | | NO: 39 | acetylglucosaminyltransferase 3 |
| 203317 | 0.00039900 | PSD4 | SEQ ID | pleckstrin and Sec7 domain containing 4 |
| at | | | NO: 25 | |
| 221958 s | 0.00040170 | FLJ23091 | SEQ ID | putative NFkB activating protein 373 |
| at | | | NO: 106 | |
| 201130 s | 0.00040570 | CDH1 | SEQ ID | cadherin 1, type 1, E-cadherin (epithelial) |
| at | | | NO: 3 | |
| 205847 | 0.00042390 | PRSS22 | SEQ ID | protease, serine, 22 |
| at | | | NO: 47 | |
| 226535 | 0.00044520 | ITGB6 | SEQ ID | integrin, beta 6 |
| at | | | NO: 137 | |
| 65517 at | 0.00045130 | AP1M2 | SEQ ID | adaptor-related protein complex 1, mu 2 subunit |
| | | | NO: 192 | |
| 91826 at | 0.00045430 | EPS8L1 | SEQ ID | EPS8-like 1 |
| | | | NO: 194 | |
| 238673 | 0.00045640 | | SEQ ID | |
| at | | | NO: 176 | |
| 221610 s | 0.00046860 | STAP2 | SEQ ID | signal-transducing adaptor protein-2 |
| at | | | NO: 104 | |
| 203779 s | 0.00047400 | EVA1 | SEQ ID | epithelial V-like antigen 1 |
| at | | | NO: 33 | |
| 222830 | 0.00047770 | TFCP2L2 | SEQ ID | transcription factor CP2-like 2 |
| at | | | NO. H2 | |
| 203780 | 0.00047790 | EVA1 | SEQ ID | epithelial V-like antigen 1 |
| at | | | NO: 34 | |
| 223233 s | 0.00048700 | CGN | SEQ ID | cingulin |
| at | | | NO: 117 | |
| 219412 | 0.00049410 | RAB38 | SEQ ID | RAB38, member RAS oncogene family |
| at | | | NO: 92 | |
| 219936 s | 0.00049770 | GPR87 | SEQ ID | G protein-coupled receptor 87 |
| at | | | NO: 97 | |
| 226226 | 0.00049820 | LOC120224 | SEQ ID | hypothetical protein BC016153 |
| at | | | NO: 134 | |
| 225911 | 0.00050990 | LOC255743 | SEQ ID | hypothetical protein LOC255743 |
| at | | | NO: 130 | |
| 226584 s | 0.00053900 | C20orf55 | SEQ ID | chromosome 20 open reading frame 55 |
| at | | | NO: 138 | |
| 208779 x | 0.00054830 | DDR1 | SEQ ID | discoidin domain receptor family, member 1 |
| at | | | NO: 55 | |
| 208084 | 0.00055660 | ITGB6 | SEQ ID | integrin, beta 6 |
| at | | | NO: 52 | |
| 226678 | 0.00058120 | UNC13D | SEQ ID | unc-13 homolog D (C. elegans) |
| at | | | NO: 139 | |
| 216949_s_at | 0.00058240 | PKD1 | SEQ ID | polycystic kidney disease 1 (autosomal dominant) |
| | | | NO: 80 | |
| 212338 | 0.00058710 | MYO1D | SEQ ID | myosin ID |
| at | | | NO: 67 | |
| 241455 | 0.00059440 | | SEQ ID | |
| at | | | NO: 183 | |
| 206043 s | 0.00063910 | KIAA0703 | SEQ ID | KIAA0703 gene product |
| at | | | NO: 48 | |
| 226706 | 0.00063930 | FLJ23867 | SEQ ID | hypothetical protein FLJ23867 |
| at | | | NO: 140 | |
| 210255 | 0.00064190 | RAD51L1 | SEQ ID | RAD51-like 1 (S. cerevisiae) |
| at | | | NO: 58 | |
| 203407 | 0.00068500 | PPL | SEQ ID | periplakin |
| at | | | NO: 29 | |
| 222859_s_at | 0.00072460 | DAPP1 | SEQ ID | dual adaptor of phosphotyrosine and 3- |
| | | | NO: 114 | phosphoinositides |
| 219856 | 0.00075780 | SARG | SEQ ID | specifically androgen-regulated protein |
| at | | | NO: 95 | |
| 38766 at | 0.00075940 | SRCAP | SEQ ID | Snf2-related CBP activator protein |
| | | | NO: 189 | |
| 239196 | 0.00076210 | ANKRD22 | SEQ ID | ankyrin repeat domain 22 |
| at | | | NO: 180 | |
| 32069 at | 0.00077000 | N4BP1 | SEQ ID | Nedd4 binding protein 1 |
| | | | NO: 187 | |
| 205780 | 0.00083050 | | SEQ ID | |
| at | | | NO: 46 | |
| 238513_at | 0.00083510 | TMG4 | SEQ ID | transmembrane gamma-carboxyglutamic acid |
| at | | | NO: 175 | protein 4 |
| 229030 | 0.00084650 | | SEQ ID | |
| at | | | NO: 151 | |
| 226400 | 0.00088590 | | SEQ ID | |
| at | | | NO: 135 | |
| 228441 s | 0.00093570 | | SEQ ID | |
| at | | | NO: 147 | |
| 243302 | 0.00096750 | | SEQ ID | |
| at | | | NO: 186 | |

Resistant

| | | | | |
|---|---|---|---|---|
| 219525 | 0.00000020 | FLJ10847 | SEQ ID | hypothetical protein FLJ10847 |
| at | | | NO: 93 | |
| 212813 | 0.00000060 | JAM3 | SEQ ID | junctional adhesion molecule 3 |
| at | | | NO: 71 | |
| 224913 s | 0.00001960 | TIMM50 | SEQ ID | translocase of inner mitochondrial membrane 50 |
| at | | | NO: 122 | homolog (yeast) |
| 212764_at | 0.00003930 | TCF8 | SEQ ID | transcription factor 8 (represses interleukin 2 |
| | | | NO: 70 | expression) |
| 202641 | 0.00004360 | ARL3 | SEQ ID | ADP-ribosylation factor-like 3 |
| at | | | NO: 19 | |
| 212233 | 0.00004550 | MAP1B | SEQ ID | microtubule-associated protein 1B |
| at | | | NO: 66 | |
| 224232 s | 0.00004560 | PX19 | SEQ ID | px19-like protein |
| at | | | NO: 120 | |
| 226905 | 0.00004590 | MGC45871 | SEQ ID | hypothetical protein MGC45871 |
| at | | | NO: 142 | |
| 218553_s_at | 0.00004620 | KCTD15 | SEQ ID | potassium channel tetramerisation domain |
| | | | NO: 84 | containing 15 |
| 215218 s | 0.00004830 | C19orf14 | SEQ ID | chromosome 19 open reading frame 14 |
| at | | | NO: 77 | |
| 200720_s_at | 0.00006360 | ACTR1A | SEQ ID | ARP1 actin-related protein 1 homolog A, centractin |
| | | | NO: 2 | alpha (yeast) |
| 224326 s | 0.00006750 | RNF134 | SEQ ID | ring finger protein 134 /// ring finger protein 134 |
| at | | | NO: 121 | |
| 242138 | 0.00006800 | DLX1 | SEQ ID | distal-less homeo box 1 |
| at | | | NO: 184 | |
| 222360 | 0.00007190 | CGI-30 | SEQ ID | CGI-30 protein |
| at | | | NO: 108 | |
| 208393 s | 0.00007530 | RAD50 | SEQ ID | RAD50 homolog (S. cerevisiae) |
| at | | | NO: 53 | |
| 228683 s | 0.00009450 | KCTD15 | SEQ ID | potassium channel tetramerisation domain |
| at | | | NO: 148 | containing 15 |
| 228882 | 0.00012370 | TUB | SEQ ID | tubby homolog (mouse) |
| at | | | NO: 150 | |
| 55662 at | 0.00013490 | C10orf76 | SEQ ID | chromosome 10 open reading frame 76 |
| | | | NO: 191 | |
| 221432_s_at | 0.00014780 | SLC25A28 | SEQ ID | solute carrier family 25, member 28 /// solute carrier |
| | | | NO: 102 | family 25, member 28 |
| 203082 | 0.00015630 | BMS1L | SEQ ID | BMS1-like, ribosome assembly protein (yeast) |
| at | | | NO: 20 | |
| 223192 | 0.00015890 | SLC25A28 | SEQ ID | solute carrier family 25, member 28 |
| at | | | NO: 116 | |
| 226084 | 0.00017240 | MAP1B | SEQ ID | microtubule-associated protein 1B |
| at | | | NO: 131 | |
| 229587 | 0.00017530 | UBA2 | SEQ ID | SUMO-1 activating enzyme subunit 2 |
| at | | | NO. 153 | |
| 211071_s_at | 0.00018080 | AF1Q | SEQ ID | ALL1-fused gene from chromosome 1q /// ALL1- |
| | | | NO: 60 | fused gene from chromosome 1q |
| 214448_x_at | 0.00018290 | NFKBIB | SEQ ID | nuclear factor of kappa light polypeptide gene |
| | | | NO: 74 | enhancer in B-cells inhibitor, beta |
| 225413 | 0.00018660 | USMG5 | SEQ ID | upregulated during skeletal muscle growth 5 |
| at | | | NO: 125 | |
| 235036 | 0.00018930 | MGC46719 | SEQ ID | hypothetical protein MGC46719 |
| at | | | NO: 165 | |
| 203441 s | 0.00019180 | CDH2 | SEQ ID | cadherin 2, type 1, N-cadherin (neuronal) |
| at | | | NO: 31 | |
| 225096 | 0.00019610 | HSA272196 | SEQ ID | hypothetical protein, clone 2746033 |
| at | | | NO: 124 | |
| 239077 | 0.00020310 | GALNACT-2 | SEQ ID | chondroitin sulfate GalNAcT-2 |
| at | | | NO: 179 | |
| 50314 i | 0.00022630 | C20orf27 | SEQ ID | chromosome 20 open reading frame 27 |
| at | | | NO: 190 | |
| 222664_at | 0.00024210 | KCTD15 | SEQ ID | potassium channel tetramerisation domain |
| | | | NO: 109 | containing 15 |
| 201869 s | 0.00024250 | TBL1X | SEQ ID | transducin (beta)-like 1X-linked |
| at | | | NO: 9 | |
| 219855_at | 0.00024820 | NUDT11 | SEQ ID | nudix (nucleoside diphosphate linked moiety X)- |
| | | | NO: 94 | type motif |
| 202167 s | 0.00026530 | MMS19L | SEQ ID | MMS19-like (MET18 homolog, S. cerevisiae) |
| at | | | NO: 10 | |
| 201157 s | 0.00027160 | NMT1 | SEQ ID | N-myristoyltransferase 1 |
| at | | | NO: 4 | |
| 226876 | 0.00030570 | MGC45871 | SEQ ID | hypothetical protein MGC45871 |
| at | | | NO: 141 | |
| 218891 | 0.00034090 | C10orf76 | SEQ ID | chromosome 10 open reading frame 76 |
| at | | | NO: 88 | |
| 222668_at | 0.00034910 | KCTD15 | SEQ ID | potassium channel tetramerisation domain |
| | | | NO: 110 | containing 15 |
| 217496 s | 0.00036040 | IDE | SEQ ID | insulin-degrading enzyme |
| at | | | NO: 81 | |
| 235202 x | 0.00036460 | [KIP | SEQ ID | IKK interacting protein |
| at | | | NO: 166 | |
| 212736 | 0.00036600 | BC008967 | SEQ ID | hypothetical gene BC008967 |
| at | | | NO: 69 | |
| 203327 | 0.00036980 | IDE | SEQ ID | insulin-degrading enzyme |
| at | | | NO: 26 | |
| 205458_at | 0.00042200 | MC1R | SEQ ID | melanocortin 1 receptor (alpha melanocyte |
| | | | NO: 43 | stimulating hormone receptor) |
| 202340_x_at | 0.00043030 | NR4A1 | SEQ ID | nuclear receptor subfamily 4, group A, member 1 |
| | | | NO: 14 | |
| 215146 s | 0.00043080 | KIAA1043 | SEQ ID | KIAA1043 protein |
| at | | | NO: 76 | |
| 223032 x | 0.00043320 | PX19 | SEQ ID | px19-like protein |
| at | | | NO: 115 | |
| 230312 | 0.00047560 | | SEQ ID | |
| at | | | NO: 156 | |
| 211855_s_at | 0.00047620 | SLC25A14 | SEQ ID | solute carrier family 25 (mitochondrial carrier, |
| | | | NO: 62 | brain), member 14 |
| 222280 | 0.00050070 | | SEQ ID | CDNA clone IMAGE: 6602785, partial cds |
| at | | | NO: 107 | |
| 223295 s | 0.00053580 | LUC7L | SEQ ID | LUC7-like (S. cerevisiae) |
| at | | | NO: 118 | |
| 212120 | 0.00053760 | RHOQ | SEQ ID | ras homolog gene family, member Q |
| at | | | NO: 65 | |
| 202328_s_at | 0.00054270 | PKD1 | SEQ ID | polycystic kidney disease 1 (autosomal dominant) |
| | | | NO: 13 | |
| 203783 x | 0.00055660 | POLRMT | SEQ ID | polymerase (RNA) mitochondria! (DNA directed) |
| at | | | NO: 35 | |
| 213262 | 0.00056350 | SACS | SEQ ID | spastic ataxia of Charlevoix-Saguenay (sacsin) |
| at | | | NO: 72 | |
| 225793 | 0.00058010 | MGC46719 | SEQ ID | hypothetical protein MGC46719 |
| at | | | NO: 128 | |
| 216949_s_at | 0.00058240 | PKD1 | SEQ ID | polycystic kidney disease 1 (autosomal dominant) |
| | | | NO: 80 | |
| 214577 | 0.00062040 | MAP1B | SEQ ID | microtubule-associated protein 1B |
| at | | | NO: 75 | |
| 220178 | 0.00062110 | C19orf28 | SEQ ID | chromosome 19 open reading frame 28 |
| at | | | NO: 99 | |
| 201868 s | 0.00062220 | TBL1X | SEQ ID | transducin (beta)-like 1X-linked |
| at | | | NO: 8 | |
| 201679 | 0.00063150 | ARS2 | SEQ ID | arsenate resistance protein ARS2 |
| at | | | NO: 6 | |
| 208968 s | 0.00066500 | CIAPIN1 | SEQ ID | cytokine induced apoptosis inhibitor 1 |
| at | | | NO: 56 | |
| 207627 s | 0.00068160 | TFCP2 | SEQ ID | transcription factor CP2 |
| at | | | NO: 50 | |
| 217791 s | 0.00069580 | ALDH18A1 | SEQ ID | aldehyde dehydrogenase 18 family, member A1 |
| at | | | NO: 82 | |
| 225582 | 0.00069740 | KIAA1754 | SEQ ID | KIAA1754 |
| at | | | NO: 126 | |
| 231721 | 0.00070410 | JAM3 | SEQ ID | junctional adhesion molecule 3 |
| at | | | NO: 158 | |
| 208595 s | 0.00074160 | MBD1 | SEQ ID | methyl-CpG binding domain protein 1 |
| at | | | NO: 54 | |
| 212015 | 0.00075720 | PTBP1 | SEQ ID | polypyrimidine tract binding protein 1 |
| X at | | | NO: 63 | |
| P204744 | 0.00076150 | IARS | SEQ ID | isoleucine-tRNA synthetase |
| s at | | | NO: 38 | |
| 203718 | 0.00076760 | NTE | SEQ ID | neuropathy target esterase |
| at | | | NO: 32 | |
| 232149_s_at | 0.00076810 | NSMAF | SEQ ID | neutral sphingomyelinase (N-SMase) activation |
| | | | NO: 161 | associated factor |
| 202264_s_at | 0.00076920 | TOMM40 | SEQ ID | translocase of outer mitochondrial membrane 40 |
| | | | NO: 11 | homolog (yeast) |
| 32069 at | 0.00077000 | N4BP1 | SEQ ID | Nedd4 binding protein 1 |
| | | | NO: 187 | |
| 216862 s | 0.00078160 | MTCP1 | SEQ ID | mature T-cell proliferation 1 |
| at | | | NO: 79 | |
| 220370 s | 0.00079540 | USP36 | SEQ ID | ubiquitin specific protease 36 |
| at | | | NO: 101 | |
| 242191 | 0.00080180 | | SEQ ID | LOC400781 |
| at | | | NO: 185 | |
| 203109_at | 0.00081840 | UBE2M | SEQ ID | ubiquitin-conjugating enzyme E2M (UBC12 |
| | | | NO: 21 | homolog, yeast) |
| 203440 | 0.00\083250 | CDH2 | SEQ ID | cadherin 2, type 1, N-cadherin (neuronal) |
| at | | | NO: 30 | |
| 221550_at | 0.00083680 | COX15 | SEQ ID | COX15 homolog, cytochrome c oxidase assembly |
| | | | NO: 103 | protein (yeast) |
| 37966 at | 0.00090730 | PARVB | SEQ ID | parvin, beta |
| | | | NO: 188 | |
| 212424 | 0.00092430 | PDCD11 | SEQ ID | programmed cell death 11 |
| at | | | NO: 68 | |
| 228441 s | 0.00093570 | | SEQ ID | |
| at | | | NO: 147 | |
| 203328 x | 0.00095810 | IDE | SEQ ID | insulin-degrading enzyme |
| at | | | NO: 27 | |
| 201680 x | 0.00095980 | ARS2 | SEQ ID | arsenate resistance protein ARS2 |
| at | | | NO: 7 | |
| 219969 | 0.00097320 | CXorf15 | SEQ ID | chromosome X open reading frame 15 |
| at | | | NO: 98 | |

### Example 1A

[0169] The following example describes the identification of a biomarker panel that discriminates gefitinib-sensitive cell lines from gefitinib-resistant cell lines.

[0170] Methods: Gefitinib sensitivity was determined in 18 NSCLC cell lines using MTT assays. Cell lines were classified as gefitinib sensitive (IC₅₀<104), resistant (IC₅₀>10 μM) or intermediate sensitivity (10 μM<IC₅₀>1). Oligonucleotide gene arrays (Affymetrix® Human Genome U133 set, 39,000 genes) were done on 10 cell lines. Three distinct filtration and normalization algorithms to process the expression data were used, and a list of genes were generated that were both statistically significant (unadjusted p=0.001 cutoff) and corrected for false positive occurrence. This approach was used in combination with 5 distinct machine learning algorithms used to build a test set for predictor genes that were successful for 100% of the test cases. The best discriminators (>3 fold difference in expression between sensitive and resistant cell lines) were selected for Real-time RT-PCR.

[0171] Results: A list of genes was generated initially from the Affymetrix array analysis. By using the mathematical algorithm, 14 different candidate genes were selected for RT-PCR. Twelve of the 14 genes were verified to discriminate between sensitive and resistant cell lines by Real-time RT-PCR.

[0172] Conclusion: Based on NSCLC cell line studies it was possible to identify genes which strongly discriminated gefitinib (Iressa) sensitive cell lines from the resistant ones. The genes are ranked in Table 1A. This entire biomarker panel is of significant value for selecting NSCLC patients for gefitinib treatment.

TABLE 1A

| | | mean | mean | | | |
|---|---|---|---|---|---|---|
| Probe | parametric | intensity | intensity | Gene | Sequence | |
| set | p-value | (resistant) | (sensitive) | symbol | Identifier | Description |
| 202286 s | 0.00000005 | 3.8 | 9893.5 | TACSTD2 | SEQ ID | tumor-associated calcium |
| at | | | | | NO: 12 | signal transducer 2 |
| 202489_s_at | 0.00000005 | 25.8 | 2372.6 | FXYD3 | SEQ ID | FXYD domain containing |
| | | | | | NO: 16 | ion transport regulator 3 |
| 213285 | 0.00000005 | 8.0 | 1739.3 | TMEM30B | SEQ ID | transmembrane protein 30B |
| at | | | | | NO: 73 | |
| 218186 | 0.00000005 | 3.6 | 2295.0 | RAB25 | SEQ ID | RAB25, member RAS |
| at | | | | | NO: 83 | oncogene family |
| 235515 | 0.00000005 | 6.4 | 287.6 | FLJ36445 | SEQ ID | hypothetical protein |
| at | | | | | NO: 168 | FLJ36445 |
| 235988 | 0.00000005 | 11.3 | 345.7 | GPR110 | SEQ ID | G protein-coupled receptor |
| at | | | | | NO: 170 | 110 |
| 238689 | 0.00000005 | 5.4 | 2210.5 | GPR110 | SEQ ID | G protein-coupled receptor |
| at | | | | | NO: 177 | 110 |
| 232165 | 0.00000010 | 4.6 | 244.0 | EPPK1 | SEQ ID | epiplakin 1 |
| at | | | | | NO: 164 | |
| 240633 | 0.00000010 | 6.2 | 61.2 | FLJ33718 | SEQ ID | hypothetical protein |
| at | | | | | NO: 182 | FLJ33718 |
| 219525 | 0.00000020 | 179.3 | 6.1 | FLJ10847 | SEQ ID | hypothetical protein |
| at | | | | | NO: 93 | FLJ10847 |
| 229599_at | 0.00000020 | 5.9 | 112.8 | | SEQ ID | Clone IMAGE: 5166045, |
| | | | | | NO: 154 | Mrna |
| 203397_s_at | 0.00000030 | 10.1 | 1128.6 | GALNT3 | SEQ ID | UDP-N-acetyl-alpha-D- |
| | | | | | NO: 28 | galactosamine:polypeptide |
| | | | | | | N- |
| | | | | | | acetylgalactosaminyltransferase |
| | | | | | | 3 (GalNAc-T3) |
| 232164 s | 0.00000030 | 5.8 | 411.1 | EPPK1 | SEQ ID | epiplakin 1 |
| at | | | | | NO: 163 | |
| 212813 | 0.00000060 | 163.8 | 7.9 | JAM3 | SEQ ID | junctional adhesion |
| at | | | | | NO: 71 | molecule 3 |
| 227134 | 0.00000160 | 14.2 | 705.7 | SYTL1 | SEQ ID | synaptotagmin-like 1 |
| at | | | | | NO: 143 | |
| 236489 | 0.00000170 | 8.2 | 498.5 | | SEQ ID | |
| at | | | | | NO: 171 | |
| 235651 | 0.00000480 | 3.9 | 98.2 | | SEQ ID | |
| at | | | | | NO: 169 | |
| 238439 | 0.00000700 | 7.7 | 537.6 | ANKRD22 | SEQ ID | ankyrin repeat domain 22 |
| at | | | | | NO: 173 | |
| 219388 | 0.00000730 | 19.3 | 342.1 | TFCP2L3 | SEQ ID | transcription factor CP2- |
| at | | | | | NO: 91 | like 3 |
| 227985 | 0.00000820 | 5.0 | 179.9 | | SEQ ID | |
| at | | | | | NO: 146 | |
| 227450 | 0.00000890 | 5.1 | 509.7 | FLJ32115 | SEQ ID | hypothetical protein |
| at | | | | | NO: 144 | FLJ32115 |
| 203256 | 0.00000980 | 13.4 | 2223.0 | CDH3 | SEQ ID | cadherin 3, type 1, P- |
| at | | | | | NO: 23 | cadherin (placental) |
| 220318 | 0.00000980 | 4.4 | 44.7 | EPN3 | SEQ ID | epsin 3 |
| at | | | | | NO: 100 | |
| 202525 | 0.00001030 | 7.8 | 1194.6 | PRSS8 | SEQ ID | protease, serine, 8 |
| at | | | | | NO: 17 | (prostasin) |
| 227803_at | 0.00001080 | 7.8 | 206.1 | ENPP5 | SEQ ID | ectonudeotide |
| | | | | | NO: 145 | pyrophosphatase/phosphodiesterase |
| | | | | | | 5 (putative |
| | | | | | | function) |
| 206884 s | 0.00001200 | 12.8 | 822.7 | SCEL | SEQ ID | Sciellin |
| at | | | | | NO: 49 | |
| 223895 s | 0.00001290 | 13.8 | 183.6 | EPN3 | SEQ ID | epsin 3 |
| at | | | | | NO: 119 | |
| 238493 | 0.00001650 | 7.3 | 18.5 | ZNF506 | SEQ ID | zinc finger protein 506 |
| at | | | | | NO. 174 | |
| 224913 s | 0.00001960 | 2703.8 | 1081.5 | TIMM50 | SEQ ID | translocase of inner |
| at | | | | | NO: 122 | mitochondrial membrane |
| | | | | | | 50 homolog (yeast) |
| 201428 | 0.00002330 | 90.3 | 3416.4 | CLDN4 | SEQ ID | claudin 4 |
| at | | | | | NO: 5 | |
| 216641 s | 0.00003760 | 26.8 | 423.5 | LAD1 | SEQ ID | ladinin 1 |
| at | | | | | NO: 78 | |
| 231929_at | 0.00003910 | 31.0 | 340.7 | | SEQ ID | MRNA; cDNA |
| | | | | | NO: 159 | DKFZp586O0724 (from |
| | | | | | | clone DKFZp586O0724) |
| 212764_at | 0.00003930 | 320.0 | 9.2 | TCF8 | SEQ ID | transcription factor 8 |
| | | | | | NO: 70 | (represses interleukin 2 |
| | | | | | | expression) |
| 238778_at | 0.00004080 | 15.0 | 106.1 | MPP7 | SEQ ID | membrane protein, |
| | | | | | NO: 178 | palmitoylated 7 (MAGUK |
| | | | | | | p55 subfamily member 7) |
| 202641 | 0.00004360 | 2011.3 | 933.3 | ARL3 | SEQ ID | ADP-ribosylation factor- |
| at | | | | | NO: 19 | like 3 |
| 212233 | 0.00004550 | 2005.7 | 137.0 | MAP1B | SEQ ID | microtubule-associated |
| at | | | | | NO: 66 | protein 1B |
| 224232 s | 0.00004560 | 1054.1 | 438.3 | PX19 | SEQ ID | px19-like protein |
| at | | | | | NO: 120 | |
| 226905 | 0.00004590 | 240.2 | 14.0 | MGC45871 | SEQ ID | hypothetical protein |
| at | | | | | NO: 142 | MGC45871 |
| 218553_s_at | 0.00004620 | 177.0 | 38.2 | KCTD15 | SEQ ID | potassium channel |
| | | | | | NO: 84 | tetramerisation domain |
| | | | | | | containing 15 |
| 215218 s | 0.00004830 | 368.6 | 142.8 | C19orf14 | SEQ ID | chromosome 19 open |
| at | | | | | NO: 77 | reading frame 14 |
| 203287 | 0.00004920 | 23.4 | 505.0 | LAD1 | SEQ ID | ladinin 1 |
| at | | | | | NO: 24 | |
| 209114 | 0.00005560 | 43.7 | 717.2 | TSPAN-1 | SEQ ID | tetraspan 1 |
| at | | | | | NO: 57 | |
| 230076 | 0.00005660 | 21.2 | 120.1 | | SEQ ID | |
| at | | | | | NO: 155 | |
| 218677 | 0.00005710 | 21.5 | 966.3 | S100A14 | SEQ ID | S100 calcium binding |
| at | | | | | NO: 85 | protein A14 |
| 236616 | 0.00005810 | 17.8 | 32.9 | | SEQ ID | CDNA FLJ41623 fis, clone |
| at | | | | | NO: 172 | CTONG3009227 |
| 205014 | 0.00006280 | 13.4 | 491.2 | FGFBP1 | SEQ ID | fibroblast growth factor |
| at | | | | | NO: 40 | binding protein 1 |
| 200720_s_at | 0.00006360 | 1089.8 | 391.9 | ACTR1A | SEQ ID | ARP1 actin-related protein |
| | | | | | NO: 2 | 1 homolog A, centractin |
| | | | | | | alpha (yeast) |
| 224326 s | 0.00006750 | 499.6 | 135.5 | RNF134 | SEQ ID | ring finger protein 134 /// |
| at | | | | | NO: 121 | ring finger protein 134 |
| 242138 | 0.00006800 | 207.4 | 6.9 | DLX1 | SEQ ID | distal-less homeo box 1 |
| at | | | | | NO: 184 | |
| 90265 at | 0.00007110 | 145.0 | 1117.7 | CENTA1 | SEQ ID | centaurin, alpha 1 |
| | | | | | NO: 193 | |
| 222360 | 0.00007190 | 97.8 | 21.2 | CGI- | SEQ ID | CGI-30 protein |
| at | | | | 30 | NO: 108 | |
| 208393 s | 0.00007530 | 1370.0 | 596.5 | RAD50 | SEQ ID | RAD50 homolog (S. cerevisiae) |
| at | | | | | NO: 53 | |
| 226403 | 0.00007930 | 22.5 | 680.1 | TMC4 | SEQ ID | transmembrane channel- |
| at | | | | | NO: 136 | like 4 |
| 232056 | 0.00008450 | 9.8 | 141.7 | SCEL | SEQ ID | Scieliin |
| at | | | | | NO: 160 | |
| 207655 s | 0.00008700 | 7.1 | 71.1 | BLNK | SEQ ID | B-cell linker |
| at | | | | | NO: 51 | |
| 228683 s | 0.00009450 | 101.5 | 18.5 | KCTD15 | SEQ ID | potassium channel |
| at | | | | | NO: 148 | tetramerisation domain |
| | | | | | | containing 15 |
| 204160_s_at | 0.00009570 | 23.9 | 314.8 | ENPP4 | SEQ ID | Ectonucleotide |
| | | | | | NO: 36 | pyrophosphatase/phosphodiesterase |
| | | | | | | 4 (putative |
| | | | | | | function) |
| 202454_s_at | 0.00009860 | 16.3 | 1266.2 | ERBB3 | SEQ ID | v-erb-b2 erythroblastic |
| | | | | | NO: 15 | leukemia viral oncogene |
| | | | | | | homolog 3 (avian) |
| 232151_at | 0.00010020 | 8.5 | 295.7 | | SEQ ID | MRNA full length insert |
| | | | | | NO: 162 | cDNA clone |
| | | | | | | EUROIMAGE 2344436 |
| 205073_at | 0.00010350 | 30.8 | 136.8 | CYP2J2 | SEQ ID | cytochrome P450, family 2, |
| | | | | | NO: 41 | subfamily J, polypeptide 2 |
| 225658 | 0.00011660 | 167.1 | 516.3 | LOC339745 | SEQ ID | hypothetical protein |
| at | | | | | NO: 127 | LOC339745 |
| 219150 s | 0.00012240 | 30.9 | 200.1 | CENTA1 | SEQ ID | centaurin, alpha 1 |
| at | | | | | NO: 90 | |
| 228882 | 0.00012370 | 152.7 | 10.4 | TUB | SEQ ID | tubby homolog (mouse) |
| at | | | | | NO: 150 | |
| 222857_s_at | 0.00012430 | 17.2 | 344.7 | KCNMB4 | SEQ ID | potassium large |
| | | | | | NO: 113 | conductance calcium- |
| | | | | | | activated channel, |
| | | | | | | subfamily M, beta member 4 |
| 55662 at | 0.00013490 | 84.7 | 31.7 | C10orf76 | SEQ ID | chromosome 10 open |
| | | | | | NO: 191 | reading frame 76 |
| 204161_s_at | 0.00013900 | 12.5 | 69.3 | ENPP4 | SEQ ID | Ectonucleotide |
| | | | | | NO: 37 | pyrophosphatase/phosphodiesterase |
| | | | | | | 4 (putative |
| | | | | | | function) |
| 205455_at | 0.00014640 | 20.1 | 333.2 | MST1R | SEQ ID | macrophage stimulating 1 |
| | | | | | NO: 42 | receptor (c-met-related |
| | | | | | | tyrosine kinase) |
| 221432_s_at | 0.00014780 | 108.4 | 34.4 | SLC25A28 | SEQ ID | solute carrier family 25, |
| | | | | | NO: 102 | member 28 /// solute carrier |
| | | | | | | family 25, member 28 |
| 203082 | 0.00015630 | 1316.0 | 435.4 | BMS1L | SEQ ID | BMS1-like, ribosome |
| at | | | | | NO: 20 | assembly protein (yeast) |
| 223192 | 0.00015890 | 391.2 | 207.2 | SLC25A28 | SEQ ID | solute carrier family 25, |
| at | | | | | NO: 116 | member 28 |
| 226084 | 0.00017240 | 1660.7 | 87.5 | MAP1B | SEQ ID | microtubule-associated |
| at | | | | | NO: 131 | protein 1B |
| 229587 | 0.00017530 | 247.0 | 86.2 | UBA2 | SEQ ID | SUMO-1 activating |
| at | | | | | NO. 153 | enzyme subunit 2 |
| 211071_s_at | 0.00018080 | 2398.5 | 76.5 | AF1Q | SEQ ID | ALL1-fused gene from |
| | | | | | NO: 60 | chromosome 1q /// ALL1- |
| | | | | | | fused gene from |
| | | | | | | chromosome 1q |
| 214448_x_at | 0.00018290 | 310.0 | 123.8 | NFKBIB | SEQ ID | nuclear factor of kappa |
| | | | | | NO: 74 | light polypeptide gene |
| | | | | | | enhancer in B-cells |
| | | | | | | inhibitor, beta |
| 225413 | 0.00018660 | 8130.9 | 4324.6 | USMG5 | SEQ ID | upregulated during skeletal |
| at | | | | | NO: 125 | muscle growth 5 |
| 235036 | 0.00018930 | 262.2 | 19.4 | MGC46719 | SEQ ID | hypothetical protein |
| at | | | | | NO: 165 | MGC46719 |
| 203441 s | 0.00019180 | 684.0 | 72.1 | CDH2 | SEQ ID | cadherin 2, type 1, N- |
| at | | | | | NO: 31 | cadherin (neuronal) |
| 235247 | 0.00019200 | 6.2 | 262.8 | | SEQ ID | |
| at | | | | | NO: 167 | |
| 225096 | 0.00019610 | 1755.7 | 703.7 | HSA272196 | SEQ ID | hypothetical protein, clone |
| at | | | | | NO: 124 | 2746033 |
| 205617 | 0.00019960 | 9.2 | 23.1 | PRRG2 | SEQ ID | proline rich Gla (G- |
| at | | | | | NO: 44 | carboxyglutamic acid) 2 |
| 225822 | 0.00020110 | 10.3 | 468.3 | MGC17299 | SEQ ID | hypothetical protein |
| at | | | | | NO: 129 | MGC17299 |
| 239077 | 0.00020310 | 146.8 | 49.3 | GALNACT-2 | SEQ ID | chondroitin sulfate |
| at | | | | | NO: 179 | GalNAcT-2 |
| 218779 x | 0.00021870 | 72.0 | 404.0 | EPS8L1 | SEQ ID | EPS8-like 1 |
| at | | | | | NO: 86 | |
| 50314 i | 0.00022630 | 830.5 | 279.4 | C20orf27 | SEQ ID | chromosome 20 open |
| at | | | | | NO: 190 | reading frame 27 |
| 218792 s | 0.00023140 | 74.9 | 468.6 | BSPRY | SEQ ID | B-box and SPRY domain |
| at | | | | | NO: 87 | containing |
| 222664_at | 0.00024210 | 624.9 | 42.5 | KCTD15 | SEQ ID | potassium channel |
| | | | | | NO: 109 | tetramerisation domain |
| | | | | | | containing 15 |
| 201869 s | 0.00024250 | 290.8 | 70.5 | TBL1X | SEQ ID | transducin (beta)-like 1X- |
| at | | | | | NO: 9 | linked |
| 219855_at | 0.00024820 | 233.0 | 27.6 | NUDT11 | SEQ ID | nudix (nucleoside |
| | | | | | NO: 94 | diphosphate linked moiety |
| | | | | | | X)-type motif |
| 203236_s_at | 0.00025890 | 81.3 | 318.7 | LGALS9 | SEQ ID | 11 lectin, galactoside- |
| | | | | | NO: 22 | binding, soluble, 9 (galectin |
| | | | | | | 9) |
| 202167 s | 0.00026530 | 770.6 | 340.7 | MMS19L | SEQ ID | MMS19-like (MET18 |
| at | | | | | NO: 10 | homolog, S. cerevisiae) |
| 229223 | 0.00026990 | 21.7 | 130.8 | | SEQ ID | |
| at | | | | | NO: 152 | |
| 201157 s | 0.00027160 | 2272.3 | 1323.6 | NMT1 | SEQ ID | N-myristoyltransferase 1 |
| at | | | | | NO: 4 | |
| 226187_at | 0.00027300 | 32.2 | 301.2 | CDS1 | SEQ ID | CDP-diacylglycerol |
| | | | | | NO: 132 | synthase (phosphatidate |
| | | | | | | cytidylyltransferase) 1 |
| 239671 | 0.00028050 | 12.2 | 43.6 | | SEQ ID | CDNA FLJ31085 fis, clone |
| at | | | | | NO: 181 | IMR321000037 |
| 222746 s | 0.00028540 | 8.7 | 288.5 | BSPRY | SEQ ID | B-box and SPRY domain |
| at | | | | | NO: 111 | containing |
| 219858 s | 0.00029160 | 12.3 | 63.1 | FLJ20160 | SEQ ID | FLJ20160 protein |
| at | | | | | NO: 96 | |
| 210749 x | 0.00029280 | 507.7 | 2452.9 | DDR1 | SEQ ID | discoidin domain receptor |
| at | | | | | NO: 59 | family, member 1 |
| 211778 s | 0.00029620 | 20.3 | 334.6 | ZNF339 | SEQ ID | zinc finger protein 339 /// |
| at | | | | | NO: 61 | zinc finger protein 339 |
| 226876 | 0.00030570 | 283.5 | 45.7 | MGC45871 | SEQ ID | hypothetical protein |
| at | | | | | NO: 141 | MGC45871 |
| 230323 s | 0.00033140 | 17.4 | 295.5 | LOC120224 | SEQ ID | hypothetical protein |
| at | | | | | NO: 157 | BC016153 |
| 221665 s | 0.00033480 | 20.5 | 172.5 | EPS8L1 | SEQ ID | EPS8-like 1 |
| at | | | | | NO: 105 | |
| 1007 s at | 0.00033840 | 469.2 | 2729.2 | DDR1 | SEQ ID | discoidin domain receptor |
| | | | | | NO: 1 | family, member 1 |
| 218891 | 0.00034090 | 218.3 | 108.6 | C10orf76 | SEQ ID | chromosome 10 open |
| at | | | | | NO: 88 | reading frame 76 |
| 218960 | 0.00034100 | 25.7 | 408.5 | TMPRSS4 | SEQ ID | transmembrane protease, |
| at | | | | | NO: 89 | serine 4 |
| 222668_at | 0.00034910 | 573.0 | 38.2 | KCTD15 | SEQ ID | potassium channel |
| | | | | | NO: 110 | tetramerisation domain |
| | | | | | | containing 15 |
| 217496 s | 0.00036040 | 593.8 | 172.2 | IDE | SEQ ID | insulin-degrading enzyme |
| at | | | | | NO: 81 | |
| 226213 | 0.00036180 | 27.4 | 1639.9 | ERBB3 | SEQ ID | v-erb-b2 erythroblastic |
| at | | | | | NO: 133 | leukemia viral oncogene |
| | | | | | | homolog 3 (avian) |
| 235202 x | 0.00036460 | 59.3 | 14.9 | [KIP | SEQ ID | IKK interacting protein |
| at | | | | | NO: 166 | |
| 212736 | 0.00036600 | 290.0 | 27.4 | BC008967 | SEQ ID | hypothetical gene |
| at | | | | | NO: 69 | BC008967 |
| 203327 | 0.00036980 | 410.7 | 105.9 | IDE | SEQ ID | insulin-degrading enzyme |
| at | | | | | NO: 26 | |
| 202597 | 0.00037880 | 5.1 | 129.6 | IRF6 | SEQ ID | interferon regulatory factor 6 |
| at | | | | | NO: 18 | |
| 228865 | 0.00037970 | 9.2 | 322.3 | SARG | SEQ ID | specifically androgen- |
| at | | | | | NO: 149 | regulated protein |
| 205709_s_at | 0.00038120 | 13.4 | 254.3 | CDS1 | SEQ ID | CDP-diacylglycerol |
| | | | | | NO: 45 | synthase (phosphatidate |
| | | | | | | cytidylyltransferase) 1 |
| 224946 s | 0.00039420 | 329.1 | 681.4 | MGC12981 | SEQ ID | hypothetical protein |
| at | | | | | NO: 123 | MGC12981 |
| 204856_at | 0.00039710 | 80.7 | 400.7 | B3GNT3 | SEQ ID | UDP-GlcNAc:betaGal |
| | | | | | NO: 39 | beta-1,3-N- |
| | | | | | | acetylglucosaminyltransferase 3 |
| 203317 | 0.00039900 | 58.0 | 171.0 | PSD4 | SEQ ID | pleckstrin and Sec7 domain |
| at | | | | | NO: 25 | containing 4 |
| 221958 s | 0.00040170 | 171.2 | 468.6 | FLJ23091 | SEQ ID | putative NFkB activating |
| at | | | | | NO: 106 | protein 373 |
| 201130 s | 0.00040570 | 15.3 | 1183.0 | CDH1 | SEQ ID | cadherin 1, type 1, E- |
| at | | | | | NO: 3 | cadherin (epithelial) |
| 205458_at | 0.00042200 | 109.4 | 57.6 | MC1R | SEQ ID | melanocortin 1 receptor |
| | | | | | NO: 43 | (alpha melanocyte |
| | | | | | | stimulating hormone |
| | | | | | | receptor) |
| 205847 | 0.00042390 | 71.8 | 206.0 | PRSS22 | SEQ ID | protease, serine, 22 |
| at | | | | | NO: 47 | |
| 202340_x_at | 0.00043030 | 336.4 | 72.7 | NR4A1 | SEQ ID | nuclear receptor subfamily |
| | | | | | NO: 14 | 4, group A, member 1 |
| 215146 s | 0.00043080 | 165.6 | 48.8 | KIAA1043 | SEQ ID | KIAA1043 protein |
| at | | | | | NO: 76 | |
| 223032 x | 0.00043320 | 5068.6 | 2903.7 | PX19 | SEQ ID | px19-like protein |
| at | | | | | NO: 115 | |
| 226535 | 0.00044520 | 15.3 | 862.3 | ITGB6 | SEQ ID | integrin, beta 6 |
| at | | | | | NO: 137 | |
| 65517 at | 0.00045130 | 50.8 | 387.0 | AP1M2 | SEQ ID | adaptor-related protein |
| | | | | | NO: 192 | complex 1, mu 2 subunit |
| 91826 at | 0.00045430 | 59.7 | 373.3 | EPS8L1 | SEQ ID | EPS8-like 1 |
| | | | | | NO: 194 | |
| 238673 | 0.00045640 | 44.3 | 578.2 | | SEQ ID | |
| at | | | | | NO: 176 | |
| 221610 s | 0.00046860 | 83.5 | 569.8 | STAP2 | SEQ ID | signal-transducing adaptor |
| at | | | | | NO: 104 | protein-2 |
| 203779 s | 0.00047400 | 17.8 | 143.2 | EVA1 | SEQ ID | epithelial V-like antigen 1 |
| at | | | | | NO: 33 | |
| 230312 | 0.00047560 | 91.2 | 11.6 | | SEQ ID | |
| at | | | | | NO: 156 | |
| 211855_s_at | 0.00047620 | 355.5 | 97.2 | SLC25A14 | SEQ ID | solute carrier family 25 |
| | | | | | NO: 62 | (mitochondrial carrier, |
| | | | | | | brain), member 14 |
| 222830 | 0.00047770 | 31.3 | 586.6 | TFCP2L2 | SEQ ID | transcription factor CP2- |
| at | | | | | NO. H2 | like 2 |
| 203780 | 0.00047790 | 33.5 | 647.3 | EVA1 | SEQ ID | epithelial V-like antigen 1 |
| at | | | | | NO: 34 | |
| 223233 s | 0.00048700 | 37.9 | 541.0 | CGN | SEQ ID | cingulin |
| at | | | | | NO: 117 | |
| 219412 | 0.00049410 | 6.2 | 241.9 | RAB38 | SEQ ID | RAB38, member RAS |
| at | | | | | NO: 92 | oncogene family |
| 219936 s | 0.00049770 | 5.8 | 171.1 | GPR87 | SEQ ID | G protein-coupled receptor |
| at | | | | | NO: 97 | 87 |
| 226226 | 0.00049820 | 31.5 | 465.5 | LOC120224 | SEQ ID | hypothetical protein |
| at | | | | | NO: 134 | BC016153 |
| 222280 | 0.00050070 | 312.5 | 152.0 | | SEQ ID | CDNA clone |
| at | | | | | NO: 107 | IMAGE: 6602785, partial |
| | | | | | | cds |
| 225911 | 0.00050990 | 6.9 | 142.2 | LOC255743 | SEQ ID | hypothetical protein |
| at | | | | | NO: 130 | LOC255743 |
| 223295 s | 0.00053580 | 463.2 | 264.9 | LUC7L | SEQ ID | LUC7-like (S. cerevisiae) |
| at | | | | | NO: 118 | |
| 212120 | 0.00053760 | 1118.9 | 381.7 | RHOQ | SEQ ID | ras homolog gene family, |
| at | | | | | NO: 65 | member Q |
| 226584 s | 0.00053900 | 81.8 | 186.8 | C20orf55 | SEQ ID | chromosome 20 open |
| at | | | | | NO: 138 | reading frame 55 |
| 202328_s_at | 0.00054270 | 307.4 | 127.3 | PKD1 | SEQ ID | polycystic kidney disease 1 |
| | | | | | NO: 13 | (autosomal dominant) |
| 208779 x | 0.00054830 | 489.8 | 2385.8 | DDR1 | SEQ ID | discoidin domain receptor |
| at | | | | | NO: 55 | family, member 1 |
| 203783 x | 0.00055660 | 33.6 | 14.8 | POLRMT | SEQ ID | polymerase (RNA) |
| at | | | | | NO: 35 | mitochondria! (DNA |
| | | | | | | directed) |
| 208084 | 0.00055660 | 29.0 | 347.8 | ITGB6 | SEQ ID | integrin, beta 6 |
| at | | | | | NO: 52 | |
| 213262 | 0.00056350 | 597.1 | 48.5 | SACS | SEQ ID | spastic ataxia of |
| at | | | | | NO: 72 | Charlevoix-Saguenay |
| | | | | | | (sacsin) |
| 225793 | 0.00058010 | 1662.4 | 133.4 | MGC46719 | SEQ ID | hypothetical protein |
| at | | | | | NO: 128 | MGC46719 |
| 226678 | 0.00058120 | 63.1 | 171.9 | UNC13D | SEQ ID | unc-13 homolog D (C. elegans) |
| at | | | | | NO: 139 | |
| 216949_s_at | 0.00058240 | 83.3 | 27.2 | PKD1 | SEQ ID | polycystic kidney disease 1 |
| | | | | | NO: 80 | (autosomal dominant) |
| 212338 | 0.00058710 | 28.0 | 335.5 | MYO1D | SEQ ID | myosin ID |
| at | | | | | NO: 67 | |
| 241455 | 0.00059440 | 7.3 | 68.8 | | SEQ ID | |
| at | | | | | NO: 183 | |
| 214577 | 0.00062040 | 279.3 | 58.3 | MAP1B | SEQ ID | microtubule-associated |
| at | | | | | NO: 75 | protein 1B |
| 220178 | 0.00062110 | 193.7 | 48.8 | C19orf28 | SEQ ID | chromosome 19 open |
| at | | | | | NO: 99 | reading frame 28 |
| 201868 s | 0.00062220 | 103.1 | 21.6 | TBL1X | SEQ ID | transducin (beta)-like 1X- |
| at | | | | | NO: 8 | linked |
| 201679 | 0.00063150 | 451.3 | 212.9 | ARS2 | SEQ ID | arsenate resistance protein |
| at | | | | | NO: 6 | ARS2 |
| 206043 s | 0.00063910 | 8.0 | 67.9 | KIAA0703 | SEQ ID | KIAA0703 gene product |
| at | | | | | NO: 48 | |
| 226706 | 0.00063930 | 81.4 | 847.1 | FLJ23867 | SEQ ID | hypothetical protein |
| at | | | | | NO: 140 | FLJ23867 |
| 210255 | 0.00064190 | 8.8 | 36.1 | RAD51L1 | SEQ ID | RAD51-like 1 (S. cerevisiae) |
| at | | | | | NO: 58 | |
| 208968 s | 0.00066500 | 2065.0 | 1181.4 | CIAPIN1 | SEQ ID | cytokine induced apoptosis |
| at | | | | | NO: 56 | inhibitor 1 |
| 207627 s | 0.00068160 | 401.7 | 205.1 | TFCP2 | SEQ ID | transcription factor CP2 |
| at | | | | | NO: 50 | |
| 203407 | 0.00068500 | 39.6 | 1680.0 | PPL | SEQ ID | periplakin |
| at | | | | | NO: 29 | |
| 217791 s | 0.00069580 | 1777.8 | 837.7 | ALDH18A1 | SEQ ID | aldehyde dehydrogenase 18 |
| at | | | | | NO: 82 | family, member A1 |
| 225582 | 0.00069740 | 415.9 | 44.7 | KIAA1754 | SEQ ID | KIAA1754 |
| at | | | | | NO: 126 | |
| 231721 | 0.00070410 | 37.7 | 4.4 | JAM3 | SEQ ID | junctional adhesion |
| at | | | | | NO: 158 | molecule 3 |
| 222859_s_at | 0.00072460 | 24.0 | 133.1 | DAPP1 | SEQ ID | dual adaptor of |
| | | | | | NO: 114 | phosphotyrosine and 3- |
| | | | | | | phosphoinositides |
| 208595 s | 0.00074160 | 263.9 | 122.8 | MBD1 | SEQ ID | methyl-CpG binding |
| at | | | | | NO: 54 | domain protein 1 |
| 212015 | 0.00075720 | 5744.3 | 3435.4 | PTBP1 | SEQ ID | polypyrimidine tract |
| X at | | | | | NO: 63 | binding protein 1 |
| 219856 | 0.00075780 | 13.9 | 230.4 | SARG | SEQ ID | specifically androgen- |
| at | | | | | NO: 95 | regulated protein |
| 38766 at | 0.00075940 | 85.9 | 281.7 | SRCAP | SEQ ID | Snf2-related CBP activator |
| | | | | | NO: 189 | protein |
| P204744 | 0.00076150 | 7537.7 | 3827.7 | IARS | SEQ ID | isoleucine-tRNA synthetase |
| s at | | | | | NO: 38 | |
| 239196 | 0.00076210 | 30.5 | 550.5 | ANKRD22 | SEQ ID | ankyrin repeat domain 22 |
| at | | | | | NO: 180 | |
| 203718 | 0.00076760 | 424.0 | 138.4 | NTE | SEQ ID | neuropathy target esterase |
| at | | | | | NO: 32 | |
| 232149_s_at | 0.00076810 | 414.2 | 127.6 | NSMAF | SEQ ID | neutral sphingomyelinase |
| | | | | | NO: 161 | (N-SMase) activation |
| | | | | | | associated factor |
| 202264_s_at | 0.00076920 | 1513.7 | 830.7 | TOMM40 | SEQ ID | translocase of outer |
| | | | | | NO: 11 | mitochondrial membrane |
| | | | | | | 40 homolog (yeast) |
| 32069 at | 0.00077000 | 147.8 | 266.2 | N4BP1 | SEQ ID | Nedd4 binding protein 1 |
| | | | | | NO: 187 | |
| 216862 s | 0.00078160 | 901.3 | 359.6 | MTCP1 | SEQ ID | mature T-cell proliferation 1 |
| at | | | | | NO: 79 | |
| 220370 s | 0.00079540 | 306.1 | 60.5 | USP36 | SEQ ID | ubiquitin specific protease |
| at | | | | | NO: 101 | 36 |
| 242191 | 0.00080180 | 152.0 | 35.5 | | SEQ ID | LOC400781 |
| at | | | | | NO: 185 | |
| 203109_at | 0.00081840 | 2445.5 | 1097.7 | UBE2M | SEQ ID | ubiquitin-conjugating |
| | | | | | NO: 21 | enzyme E2M (UBC12 |
| | | | | | | homolog, yeast) |
| 205780 | 0.00083050 | 39.8 | 941.1 | | SEQ ID | |
| at | | | | | NO: 46 | |
| 203440 | 0.00\083250 | 503.5 | 78.6 | CDH2 | SEQ ID | cadherin 2, type 1, N- |
| at | | | | | NO: 30 | cadherin (neuronal) |
| 238513_at | 0.00083510 | 73.6 | 618.6 | TMG4 | SEQ ID | transmembrane gamma- |
| | | | | | NO: 175 | carboxyglutamic acid |
| | | | | | | protein 4 |
| 221550_at | 0.00083680 | 414.1 | 200.9 | COX15 | SEQ ID | COX15 homolog, |
| | | | | | NO: 103 | cytochrome c oxidase |
| | | | | | | assembly protein (yeast) |
| 229030 | 0.00084650 | 5.9 | 70.1 | | SEQ ID | |
| at | | | | | NO: 151 | |
| 226400 | 0.00088590 | 2284.5 | 4256.7 | | SEQ ID | |
| at | | | | | NO: 135 | |
| 37966 at | 0.00090730 | 127.8 | 9.3 | PARVB | SEQ ID | parvin, beta |
| | | | | | NO: 188 | |
| 212424 | 0.00092430 | 381.6 | 115.2 | PDCD11 | SEQ ID | programmed cell death 11 |
| at | | | | | NO: 68 | |
| 228441 s | 0.00093570 | 12.0 | 49.8 | | SEQ ID | |
| at | | | | | NO: 147 | |
| 203328 x | 0.00095810 | 411.3 | 112.2 | IDE | SEQ ID | insulin-degrading enzyme |
| at | | | | | NO: 27 | |
| 201680 x | 0.00095980 | 1383.3 | 765.5 | ARS2 | SEQ ID | arsenate resistance protein |
| at | | | | | NO: 7 | ARS2 |
| 243302 | 0.00096750 | 14.2 | 29.1 | | SEQ ID | |
| at | | | | | NO: 186 | |
| 219969 | 0.00097320 | 102.8 | 21.4 | CXorf15 | SEQ ID | chromosome X open |
| at | | | | | NO: 98 | reading frame 15 |
| 212016 s | 0.00099210 | 4187.6 | 2276.0 | PTBP1 | SEQ ID | polypyrimidine tract |
| at | | | | | NO: 64 | binding protein 1 |

### Example 1B

[0173] The following example describes the identification of a biomarker panel that discriminates erlotinib-sensitive cell lines from erlotinib-resistant cell lines.

[0174] Methods: Erlotinib sensitivity is determined in 18 NSCLC cell lines using MTT assays. Cell lines are classified as erlotinib sensitive (IC₅₀<1 μM), resistant (IC₅₀>10 μM) or intermediate sensitivity (10 μM<IC₅₀>1). Oligonucleotide gene arrays (Affymetrix® Human Genome U133 set, 39,000 genes) are done on 10 cell lines. Three distinct filtration and normalization algorithms to process the expression data are used, and a list of genes are generated that are both statistically significant (unadjusted p=0.001 cutoff) and corrected for false positive occurrence. This approach is used in combination with 5 distinct machine learning algorithms used to build a test set for predictor genes that are successful for 100% of the test cases. The best discriminators (>3 fold difference in expression between sensitive and resistant cell lines) are selected for Real-time RT-PCR.

[0175] Results: A list of genes is generated initially from the Affymetrix array analysis. By using the mathematical algorithm, 10-20 different candidate genes are selected for RT-PCR.

[0176] Conclusion: Based on NSCLC cell line studies it is possible to identify genes which strongly discriminate erlotinib sensitive cell lines from the resistant ones.

### Example 1C

[0177] The following example describes the identification of a biomarker panel that discriminates lapatinib-sensitive cell lines from lapatinib-resistant cell lines.

[0178] Methods: Lapatinib sensitivity is determined in 18 NSCLC cell lines using MTT assays. Cell lines are classified as lapatinib sensitive (IC₅₀<1 μM), resistant (IC₅₀>10 μM) or intermediate sensitivity (10 μM<IC₅₀>1). Oligonucleotide gene arrays (Affymetrix® Human Genome U133 set, 39,000 genes) are done on 10 cell lines. Three distinct filtration and normalization algorithms to process the expression data are used, and a list of genes are generated that are both statistically significant (unadjusted p=0.001 cutoff) and corrected for false positive occurrence. This approach is used in combination with 5 distinct machine learning algorithms used to build a test set for predictor genes that are successful for 100% of the test cases. The best discriminators (>3 fold difference in expression between sensitive and resistant cell lines) are selected for Real-time RT-PCR.

[0179] Results: A list of genes is generated initially from the Affymetrix array analysis. By using the mathematical algorithm, 10-20 different candidate genes are selected for RT-PCR.

[0180] Conclusion: Based on NSCLC cell line studies it is possible to identify genes which strongly discriminate lapatinib sensitive cell lines from the resistant ones.

### Example 2

[0181] The following example describes the identification and further investigation of a target gene identified using the gene expression profile disclosed herein.

[0182] In this experiment, the present inventors describe research to examine the influence of E-cadherin-regulatory molecules on non-small cell lung cancer (NSCLC) response to EGF receptor (EGFR) inhibitors.

[0183] The EGFR, a member of the erbB family of tyrosine kinases (erbB1-4) plays a major role in transmitting stimuli that lead to NSCLC cellular proliferation and survival. EGFR, highly expressed in NSCLC, is a primary target for NSCLC therapeutic intervention. In clinical trials, 11-20% of patients with chemo-refractory advanced stage NSCLC responded to treatment with EGFR inhibitors such as gefitinib (Iressa®, ZD1839). Currently, there are no markers that predict which patients will respond to treatment. NSCLC patients with poor survival have decreased expression of E-cadherin, a cell adhesion molecule. E-cadherin expression is regulated by the wnt pathway and by zinc finger transcription factors including δEF1/ZEB1 and SIP1/ZEB2. Higher levels of protein expression of E-cadherin were detected in gefitinib sensitive NSCLC cell lines and expression was absent in gefitinib resistant lines. Conversely, expression of the E-cadherin inhibitors ZEB1 and SEP1 was higher in gefitinib resistant cell lines. The hypothesis of this project is that expression of E-cadherin and its regulatory molecules predict response to EGFR inhibitors, and modulating E-cadherin regulatory proteins may augment response to EGFR inhibitors in non-small cell lung cancer.

[0184] E-cadherin, a calcium-dependent epithelial cell adhesion molecule, plays an important role in tumor invasiveness and metastatic potential. Reduced E-cadherin expression is associated with tumor cell dedifferentiation, advanced stage and reduced survival in patients with NSCLC. At the transcriptional level, the wnt/β-catenin signaling pathway regulates DE-cadherin expression. The present inventors have reported that inhibition of GSK313, involved in the proteasomal degradation of β-catenin, lead E-cadherin upregulation (FIG. 2). E-cadherin transcription is also regulated by zinc finger transcription factors including, Snail, Slug, ZEB1 and SIP1. They repress E-cadherin expression by binding to its promoter and recruiting HDAC (FIG. 2). The inventors have reported that inhibiting the ZEB1 or HDAC expression lead to upregulation of E-cadherin in NSCLC cell lines.

[0185] In this experiment, the inventors used NSCLC cell lines to: (1) evaluate the growth inhibitory properties of EGFR inhibitors by MTT assays, (2) to identify molecular molecules through DNA microarrays and westerns that predict response to EGFR inhibitors and (3) to design combination therapies that enhance the effect of the EGFR inhibitors. Cell lines were screened for expression of members of the EGFR and Wnt signaling pathways. E-cadherin expression was found to be lacking in gefitinib resistant cell lines and activated in gefitinib sensitive lines. Therefore, the expression of zinc finger transcription factors involved in E-cadherin repression was investigated. It was determined that gefitinib resistant lines have high ZEB1 and/or SIP1 expression, and expression is lacking in gefitinib-sensitive lines.

[0186] The inventors proposed that SIP1 and ZEB1 expression predicts EGFR tyrosine kinase inhibitors resistance and that modulating the molecular mechanism that regulate E-cadherin expression will enhance sensitivity to EGFR inhibitors. The proposal will be tested by manipulating E-cadherin expression and measuring the effect on response to gefitinib. Results of this work will be evaluated in clinical trials in patients with NSCLC.

### Results

[0187] EGFR. pEGFR. Her2. ErbB3 and Erb4 Expression in NSCLC:

[0188] EGFR, Her-2 and ErbB3 cell surface expression was evaluated using flow cytometry (Table 2). The majority of NSCLC cell lines (15/18) had a high percentage of EGFR positive cells and three had low or no EGFR expression. The two BAC cell lines, H322 and H358, had high expression of EGFR and Her2.

TABLE 2

| | FACS | FACS | FACS | |
|---|---|---|---|---|
| | % EGFR/ | % Her2/ | % ErbB3/ | IC 50 uM |
| Cell Line | MFI | MFI | MFI | ZD 1839 |
| Adenocarcinoma | | | | |
| Calu3 | 98%/8.9 | 100/37 | 32/4.3 | <1 |
| Colo699 | 0/0 | 0/0 | 57/2.3 | 4.1 |
| H125 | 100/34 | 91/2.8 | 0/0 | 4.7 |
| H2122 | 94/5.1 | 73/4 | 80/5 | 4.8 |
| H1435 | 98/14 | ND | 94/6.4 | 7.6 |
| A549 | 99/14 | 72/2.4 | 54/3.5 | 8.4 |
| H441 | 78/6.9 | 79/2.6 | 0/0 | 11.7 |
| HI 648 | 98/5.7 | 78/2.7 | 0/0 | 11.5 |
| Bronchoalveolar | | | | |
| H322 | 100/16 | 96.5.5 | ND | <1 |
| H358 | ND | ND | ND | <1 |
| Squamous Cell | | | | |
| NE18 | 100/16 | 98/3.3 | 35/5.7 | 8 |
| H1703 | 99/15 | 65/2.6 | 0/0 | 9.3 |
| H157 | 93/13 | 62/1.8 | 0/0 | 10.1 |
| H520 | 0/0 | 0/0 | 0/0 | 10.3 |
| H1264 | 100/14 | 43/1.9 | 0/0 | 10.2 |
| Large Cell | | | | |
| H1334 | 100/23 | 74/3.2 | 99/10 | 3.8 |
| H460 | 37/1.9 | 57/1.4 | 0/0 | 9/9 |

[0189] The presence of phosphorylated EGFR (pEGFR) versus EGFR was evaluated by Western blotting in 18 NSCLC cell lines (FIG. 3, shows 15 cell lines). EGFR was detected in the majority of NSCLC cell lines, whereas only a subset of these cell lines had (pEGFR).

### Effects of EGFR Inhibitors on Human Lung Cancer Cells Growth:

[0190] The growth inhibitory effect of gefitinib, on 18 NSCLC cell lines was evaluated using the MTT assay (Table 2). There was no correlation between the EGFR expression and gefitinib response. The change in pEGFR following gefitinib treatment was evaluated in two sensitive cell lines, H1334 and H322, and two resistant cell lines, H1264 and H1648 (FIG. 4). Gefitinib inhibited the phosphorylated “active” form of EGFR in sensitive cell lines.

[0191] Based on the in vitro experiments, athymic nude mice bearing human NSCLC xenografts were treated with EGFR inhibitors ZD1839 or C225. Growth delay was evident in tumors after treatment with either agent (FIG. 5).

### E-Cadherin, SIP1 and ZEB1 in NSCLC Cell Lines Using Microarray and RT-PCR and Western Blotting:

[0192] High density oligonucleotide microarray (IOAM) analysis of gene expression levels of selected genes was developed from 11 NSCLC cell lines. These cell lines included 2 gefitinib sensitive lines (IC₅₀<1 μM), 5 gefitinib resistant lines (IC₅₀>1 μM), and 4 lines with intermediate sensitivity (IC₅₀>1 μM, <10 μM). The expression of E-cadherin, SIP1 and ZEB1 was evaluated and compared to their expression in normal bronchial epithelium using the Gene Spring program (FIG. 6).

[0193] E-cadherin expression was more pronounced in gefitinib sensitive lines and absent in gefitinib resistant lines. This expression pattern was confirmed using western blotting and real time PCR (RT-PCR) (FIG. 7).

[0194] As discussed above, regulation of E-cadherin expression involves the zinc finger transcription factors ZEB1 and SIP1. Expression of both transcription factors was evaluated using real time RT-PCR. ZEB1 and SIP1 were expressed in the gefitinib resistant lines and absent in the gefitinib sensitive lines (FIG. 8). The expression of Slug, Snail, Wnt7a, β-catenin, γ-catenin, α-catenin and GSK3β was also evaluated using Western blot analysis or RT-PCR. None of theses molecules had a differential pattern of expression in the NSCLC lines (data not shown).

[0195] In summary, there was no correlation between gefitinib sensitivity and EGFR expression. E-cadherin was detected preferentially in gefitinib sensitive lines.

[0196] Conversely, the zinc finger transcription factors, ZEB1 and SIP1, involved in E-cadherin inhibition were expressed in gefitinib resistant lines and absent in gefitinib sensitive lines.

### Example 3

[0197] This example describes the evaluation of the detrimental effect of the zinc finger proteins ZEB1 and SIP1 on NSCLC cell lines sensitivity to EGFR inhibitors.

[0198] In the first part of this experiment, adenoviral constructs containing ZEB1 or SIP1 are used to overexpress these proteins in gefitinib sensitive cell lines. MTT assay will assess changes in gefitinib sensitivity. In the second part of this experiment, stably transfected ZEB1 and SIP1 cell lines and untransfected cell lines are implanted into nude mice. Transplanted mice are treated with gefitinib and the response is compared between the two groups.

### Example 4

[0199] This example describes the determination of the molecular mechanisms that improve the response to EGFR inhibitors in NSCLC cell lines in vitro and in vivo.

[0200] In the first part of this experiment, the effect of “silencing” the E-cadherin transcriptional repressors, SIP1 and ZEB1, on NSCLC cell lines response to ZD1839 is examined. To directly examine the role of the zinc-finger transcription factors, SIP1 and ZEB1 on gefitinib responsive lines, the effect of siRNA is developed and tested (FIG. 9). siRNA is prepared for different regions of SIP1 and ZEB1 using the silencer kit from Dharmacon (Colorado). Their efficacy is tested by RT-PCR. The most effective siRNA for SIP1 and ZEB1 are then introduced, individually or in combination, into gefitinib resistant lines. The effect of these siRNAs on gefitinib responsiveness is evaluated by MTT assay. ZEB1 antibody (Santa Cruz, Calif.) and SIP1 antibody (a gift from Dr. van Grunsven) are used to evaluate the efficacy of RNA inhibition.

[0201] In the second part of this experiment, the effect of inhibiting GSK3β on gefitinib response in NSCLC cell lines is examined. GSK3β phosphorylates β-catenin leading to its ubiquitination and destruction. GSK3β inhibitors, such as lithium, increased E-cadherin expression in NSCLC cell lines. GSK3β function is inhibited with an adenovirus (pAdTrack-CMV) encoding a dominant-negative GSK3β (dnGSK3β). To determine the effectiveness of this dnGSKβ the expression of non-phosphorylated β-catenin and E-cadherin is evaluated by western blot. NSCLC cell lines stably transfected with the dnGSK3β construct are generated. The effect of inhibiting GSK3β on NSCLC cell lines response to gefitinib are evaluated using MTT assays.

[0202] In the third part of this experiment, the effect of E-cadherin on gefitinib sensitivity is evaluated. Resistant NSCLC lines are transfected with E-cadherin encoding constructs. Changes in NSCLC cell lines response to gefitinib are assessed by MTT assay. Gefitinib-sensitive lines that express E-cadherin are treated with an E-cadherin antibody (Zymed) and the effect on gefitinib responsiveness assessed by MTT assay. The results determine whether expression of E-cadherin itself is sufficient to determine gefitinib sensitivity, or if sensitivity is a reflexion of events occurring upstream of it.

[0203] In the fourth part of this experiment, the effect of gefitinib responsiveness on NSCLC cell lines is augmented in vivo. Based on findings from the above in vitro experiments, the best treatment that enhances gefitinib sensitivity in NSCLC cell lines is selected for in vivo experiments in nude mice. Previously, the inventors showed an inhibitory effect of gefitinib alone on NSCLC xenografts growth (see above). The combination of gefitinib with one of the above-evaluated interventions is tested in athymic nude mice bearing human NSCLC xenografts. E-cadherin inducible cell lines from the in vitro experiments are inoculated subcutaneously in nude mice. Mice are treated with gefitinib with and without the agent that improved the gefitinib sensitivity. The two groups are evaluated for differences in tumor growth inhibition. Expression of E-cadherin, SIP1 and ZEB1 are evaluated both prior to and post-treatment by real-time RT-PCR and immunohistochemistry. ZEB1 antibody (Santa Cruz, Calif.) and SIP1 antibody (a gift from Dr. van Grunsven) are used in the immunohistochemistry. However, new antibodies can readily be generated if the above antibodies are not effective at detecting proteins in the IHC assays.

[0204] The results of these experiments dissect out the events leading to gefitinib resistance in order to develop treatment modifications that bypass resistance.

### Example 5

[0205] The following example describes the identification of a biomarker panel that discriminates lapatinib-sensitive colon cancer cell lines from lapatinib-resistant colon cancer cell lines. A colon cancer cell line is evaluated for genes that discriminate between lapatinib-sensitive and lapatinib-resistant cell lines. Lapatinib sensitivity is determined in multiple established colon cancer cell lines that are classified as either lapatinib sensitive or lapatinib-resistant. Oligonucleotide gene arrays (Affymetrix® Human Genome U133 set, 39,000 genes) are done on the cell lines. At least three distinct filtration and normalization algorithms to process the expression data are used, and a list of expressed genes is generated. This approach is used in combination with at least five distinct machine learning algorithms to identify and build a test set of sensitivity-predictor genes. The identified sensitivity-predictor genes are selected for RT-PCR testing/screening and verified via RT-PCR for discrimination between lapatinib-sensitive and lapatinib-resistant cell lines.

### Example 6

[0206] The following example describes the identification of a biomarker panel that discriminates gefitinib-sensitive breast cancer cell lines from gefitinib-resistant breast cancer cell lines. A breast cancer cell line is evaluated for genes that discriminate between gefitinib-sensitive and gefitinib-resistant cell lines. Gefitinib sensitivity is determined in multiple established breast cancer cell lines that are classified as either gefitinib sensitive or gefitinib-resistant. Oligonucleotide gene arrays (Affymetrix® Human Genome U133 set, 39,000 genes) are done on the cell lines. At least three distinct filtration and normalization algorithms to process the expression data are used, and a list of expressed genes is generated. This approach is used in combination with at least five distinct machine learning algorithms to identify and build a test set of sensitivity-predictor genes. The identified sensitivity-predictor genes are selected for RT-PCR testing/screening and verified via RT-PCR for discrimination between gefitinib-sensitive and gefitinib-resistant cell lines.

### Example 7

[0207] The following example describes the identification of a biomarker panel that discriminates erlotinib-sensitive non-small cell lung cancer cell lines from erlotinib-resistant non-small cell lung cancer cell lines. A non-small cell lung cancer cell line is evaluated for genes that discriminate between erlotinib-sensitive and erlotinib-resistant cell lines. Erlotinib sensitivity is determined in multiple established non-small cell lung cancer cell lines that are classified as either erlotinib-sensitive or erlotinib-resistant. Oligonucleotide gene arrays (Affymetrix® Human Genome U133 set, 39,000 genes) are done on the cell lines. At least three distinct filtration and normalization algorithms to process the expression data are used, and a list of expressed genes is generated. This approach is used in combination with at least five distinct machine learning algorithms to identify and build a test set of sensitivity-predictor genes. The identified sensitivity-predictor genes are selected for RT-PCR testing/screening and verified via RT-PCR for discrimination between erlotinib-sensitive and erlotinib-resistant cell lines.

### Example 8

[0208] The following example describes the identification of a biomarker panel that discriminates erlotinib-sensitive breast cancer cell lines from erlotinib-resistant breast cancer cell lines. A breast cancer cell line is evaluated for genes that discriminate between erlotinib-sensitive and resistant cell lines. Erlotinib sensitivity is determined in multiple established breast cancer cell lines that are classified as either erlotinib sensitive or erlotinib-resistant. Oligonucleotide gene arrays (Affymetrix® Human Genome U133 set, 39,000 genes) are done on the cell lines. At least three distinct filtration and normalization algorithms to process the expression data are used, and a list of expressed genes is generated. This approach is used in combination with at least five distinct machine learning algorithms to identify and build a test set of sensitivity-predictor genes. The identified sensitivity-predictor genes are selected for RT-PCR testing/screening and verified via RT-PCR for discrimination between erlotinib-sensitive and erlotinib-resistant cell lines.

### Example 9

[0209] The following example describes the identification of a biomarker panel that discriminates lapatinib-sensitive colorectal cancer cell lines from lapatinib-resistant colorectal cancer cell lines. A colorectal cancer (CRC) cell line is evaluated for genes that discriminate between lapatinib-sensitive and lapatinib-resistant cell lines. Lapatinib sensitivity is determined in multiple established CRC cancer cell lines that are classified as either lapatinib sensitive or lapatinib-resistant. Oligonucleotide gene arrays (Affymetrix® Human Genome U133 set, 39,000 genes) are performed on the CRC cell lines. At least three distinct filtration and normalization algorithms to process the expression data are used, and a list of expressed genes is generated. This approach is used in combination with at least five distinct machine learning algorithms to identify and build a test set of sensitivity-predictor genes. The identified sensitivity-predictor genes are selected for RT-PCR testing/screening and verified via RT-PCR for discrimination between lapatinib-sensitive and lapatinib-resistant CRC cell lines.

### Example 10

[0210] The following example describes the identification of a biomarker panel that discriminates erlotinib-sensitive pancreatic cancer cell lines from erlotinib-resistant pancreatic cancer cell lines. A pancreatic cancer cell line is evaluated for genes that discriminate between erlotinib-sensitive and erlotinib-resistant cell lines. Erlotinib sensitivity is determined in multiple established pancreatic cancer cell lines that are classified as either erlotinib-sensitive or erlotinib-resistant. Oligonucleotide gene arrays (Affymetrix® Human Genome U133 set, 39,000 genes) are performed on the pancreatic cancer cell lines. At least three distinct filtration and normalization algorithms to process the expression data are used, and a list of expressed genes is generated. This approach is used in combination with at least five distinct machine learning algorithms to identify and build a test set of sensitivity-predictor genes. The identified sensitivity-predictor genes are selected for RT-PCR testing/screening and verified via RT-PCR for discrimination between erlotinib-sensitive and erlotinib-resistant pancreatic cell lines. (Buck et al., Mol. Cancer. Ther., 5(8): 2051-2059 (2006)).

### Example 11

[0211] In this example, a method to identify and correlate specific gene expression products in breast cancer that predict responsiveness to erlotinib. Breast cancer cell lines are treated with varying dosages of erlotinib, including the recommended and established ranges for the commercially available product. EGFR, Her2, ErbB3, Her3, and E-cadherin cell surface expression on the established breast cancer cell lines is evaluated by flow cytometry with antibodies specific to each cell-surface marker. After determining the cell-surface expression levels of the identified markers, the presence of phosphorylated forms for each marker are assayed via western blotting. Detection of phosphorylated proteins is achieved via the use of commercial/established antibodies for such molecules. Finally, inhibition of growth in the breast cancer cell lines following treatment with erlotinib is determined by MTT assay using established methods and detection techniques known in the art. The correlation of marker expression, marker phosphorylation, and growth inhibition in response to erlotinib treatment can establish which markers are predictive of erlotinib sensitivity.

### Example 12

[0212] In this example, a method to identify and correlate specific gene expression products in colorectal cancer that predict responsiveness to lapatinib. Colorectal cancer (CRC) cell lines are treated with varying dosages of lapatinib, including the recommended and established ranges for the commercially available product. EGFR, Her2, ErbB3, Her3, and E-cadherin cell surface expression on the established CRC cancer cell lines is evaluated by flow cytometry with antibodies specific to each cell-surface marker. After determining the cell-surface expression levels of the identified markers, the presence of phosphorylated forms for each marker are assayed via western blotting. Detection of phosphorylated proteins is achieved via the use of commercial/established antibodies for such molecules. Finally, inhibition of growth in the CRC cancer cell lines following treatment with lapatinib is determined by MTT assay using established methods and detection techniques known in the art. The correlation of marker expression, marker phosphorylation, and growth inhibition in response to lapatinib treatment can establish which markers are predictive of lapatinib sensitivity.

### Example 13

[0213] In this example, a method to identify and correlate specific gene expression products in breast cancer that predict responsiveness to gefitinib. Breast cancer cell lines are treated with varying dosages of gefitinib, including the recommended and established ranges for the commercially available product. EGFR, Her2, ErbB3, Her3, and E-cadherin cell surface expression on the established breast cancer cell lines is evaluated by flow cytometry with antibodies specific to each cell-surface marker. After determining the cell-surface expression levels of the identified markers, the presence of phosphorylated forms for each marker are assayed via western blotting. Detection of phosphorylated proteins is achieved via the use of commercial/established antibodies for such molecules. Finally, inhibition of growth in the breast cancer cell lines following treatment with gefitinib is determined by MTT assay using established methods and detection techniques known in the art. The correlation of marker expression, marker phosphorylation, and growth inhibition in response to gefitinib treatment can establish which markers are predictive of gefitinib sensitivity.

### Example 14

[0214] In this example, a method to identify and correlate specific gene expression products in non-small cell lung cancer that predict responsiveness to erlotinib. Non-small cell lung cancer cell lines are treated with varying dosages of erlotinib, including the recommended and established ranges for the commercially available product. EGFR, Her2, ErbB3, Her3, and E-cadherin cell surface expression on the established non-small cell lung cancer cell lines is evaluated by flow cytometry with antibodies specific to each cell-surface marker. After determining the cell-surface expression levels of the identified markers, the presence of phosphorylated forms for each marker are assayed via western blotting. Detection of phosphorylated proteins is achieved via the use of commercial/established antibodies for such molecules. Finally, inhibition of growth in the non-small cell lung cancer cell lines following treatment with erlotinib is determined by MTT assay using established methods and detection techniques known in the art. The correlation of marker expression, marker phosphorylation, and growth inhibition in response to erlotinib treatment can establish which markers are predictive of erlotinib sensitivity.

### Example 15

[0215] In this example, a method to identify and correlate specific gene expression products in pancreatic cancer that predict responsiveness to erlotinib. Pancreatic cancer cell lines are treated with varying dosages of erlotinib, including the recommended and established ranges for the commercially available product. EGFR, Her2, ErbB3, Her3, and E-cadherin cell surface expression on the established pancreatic cancer cell lines is evaluated by flow cytometry with antibodies specific to each cell-surface marker. After determining the cell-surface expression levels of the identified markers, the presence of phosphorylated forms for each marker are assayed via western blotting. Detection of phosphorylated proteins is achieved via the use of commercial/established antibodies for such molecules. Finally, inhibition of growth in the pancreatic cancer cell lines following treatment with erlotinib is determined by MTT assay using established methods and detection techniques known in the art. The correlation of marker expression, marker phosphorylation, and growth inhibition in response to erlotinib treatment can establish which markers are predictive of erlotinib sensitivity. (Buck et al., Mol. Cancer. Ther., 5(8): 2051-2059 (2006)).

### Example 16

[0216] In this example, a method to identify and correlate specific gene expression products in colorectal cancer that predict responsiveness to erlotinib. Colorectal cancer (CRC) cell lines are treated with varying dosages of erlotinib, including the recommended and established ranges for the commercially available product. EGFR, Her2, ErbB3, Her3, and E-cadherin cell surface expression on the established CRC cancer cell lines is evaluated by flow cytometry with antibodies specific to each cell-surface marker. After determining the cell-surface expression levels of the identified markers, the presence of phosphorylated forms for each marker are assayed via western blotting. Detection of phosphorylated proteins is achieved via the use of commercial/established antibodies for such molecules. Finally, inhibition of growth in the CRC cancer cell lines following treatment with erlotinib is determined by MTT assay using established methods and detection techniques known in the art. The correlation of marker expression, marker phosphorylation, and growth inhibition in response to lapatinib treatment can establish which markers are predictive of erlotinib sensitivity. (Buck et al., Mol. Cancer. Ther., 5(8): 2051-2059 (2006)).

### Example 17

[0217] In this example, a method to identify and correlate specific gene expression products in urothelial cancer that predict responsiveness to cetuximab. Urothelial carcinoma cell lines are treated with varying dosages of cetuximab, including the recommended and established ranges for the commercially available product. EGFR, Her2, ErbB3, Her3, and E-cadherin cell surface expression on the established CRC cancer cell lines is evaluated by flow cytometry with antibodies specific to each cell-surface marker. After determining the cell-surface expression levels of the identified markers, the presence of phosphorylated and unphosphorylated forms for each marker are assayed via western blotting. Detection of phosphorylated proteins is achieved via the use of commercial/established antibodies for such molecules. Finally, inhibition of growth in the urothelial carcinoma cancer cell lines following treatment with cetuximab is determined by MTT assay using established methods and detection techniques known in the art. The correlation of marker expression, marker phosphorylation, and growth inhibition in response to lapatinib treatment can establish which markers are predictive of erlotinib sensitivity. (Black et al., Clin. Cancer Res. 14(5): 1478-1486 (2008)).

### Example 18

[0218] In this example, a method to identify and correlate specific gene expression products in head and neck cancer that predict responsiveness to gefitinib. Head and neck cancer cell lines are treated with varying dosages of gefitinib, including the recommended and established ranges for the commercially available product. EGFR, Her2, ErbB3, Her3, and E-cadherin cell surface expression on the established head and neck cancer cell lines is evaluated by flow cytometry with antibodies specific to each cell-surface marker. After determining the cell-surface expression levels of the identified markers, the presence of phosphorylated forms for each marker are assayed via western blotting. Detection of phosphorylated proteins is achieved via the use of commercial/established antibodies for such molecules. Finally, inhibition of growth in the head and neck cancer cell lines following treatment with gefitinib is determined by MTT assay using established methods and detection techniques known in the art. The correlation of marker expression, marker phosphorylation, and growth inhibition in response to gefitinib treatment can establish which markers are predictive of gefitinib sensitivity. (Frederick et al., Mol. Cancer. Ther., 6(6): 1683-1691 (2007)).

### Example 19

### Expression of E-Cadherin, Zeb-1 and EGFR in Pancreatic Cancer and Head & Neck Cancer (H&N) Cell Lines

[0219] Pancreatic and H&N cancer cell lines were assayed for the expression of E cadherin, EGFR, and ZEB1. The expression was assayed using RT-PCR with forward and reverse primers specific for the respective genes. A control of β-actin was also assayed and shown in the results. E-cadherin, EGFR and ZEB1 expression levels are described relative to the β-actin expression levels.

[0220] Total RNA was prepared from cell lines using the RNAeasy kit (Qiagen) and RNA isolation from paraffin embedded tissue kit (qiagen). cDNA was transcribed from 1 μg of each sample using AffinityScript™ QPCR cDNA Synthesis Kit (Stratagene, La Jolla, Calif.). Quantitative Real-Time PCR were performed 1/20th of the cDNA reaction using the Brilliant® SYBR® Green QPCR Core Reagent Kit (Stratagene). Amplification data were analyzed by using GENEAMP 5700 SDS software, converted into cycle numbers at a set cycle threshold (Ct values) and quantified in relation to a standard. Human adult-lung RNA (Clontech Lab. Inc) was used as standard at 20, 4, 0.8, 0.16 ng in all the experiments. To normalize for the amount of input cDNA, the quantified relative amount of the generated product was divided by the amount generated for 13-Actin. Cycling conditions were 50° C. for 10 seconds and 95° C. for 10 minutes, followed by 46 cycles at 95° C. for 15 seconds and 60° C. for 1 minute. All samples were performed in triplicates.

[0221] Pancreatic cell-lines assayed included Panc04.03, Panc02.03, HS766T, Panc03.27 and HPAFII. Head & Neck cancer cell lines assayed included Detroit562, FaDu, UMSCC19, and UMSCC22B. In both pancreatic and H&N cell lines there was negative correlation between expression of Zeb-1 and E-cadherin.

| | SQ Mean/β actin | | |
|---|---|---|---|
| Cell lines | Ecad | EGFR | ZEB1 |
| Panc04.03 | 1.866 | 2.306 | 0.017 |
| Panc02.03 | 3.689 | 5.294 | 0.022 |
| HS766T | 0.004 | 1.121 | 0.915 |
| Panc03.27 | 1.415 | 2.623 | 0.057 |
| HPAFII | 2.729 | 2.401 | 0.048 |
| Detroit562 | 1.053 | 3.654 | 0.013 |
| FaDu | 1.273 | 4.662 | 0.024 |
| UMSCC19 | 1.295 | 1.577 | 0.021 |
| UMSCC22B | 0.001 | 1.055 | 0.485 |

[0222] While various embodiments of the present invention have been described in detail, it is apparent that modifications and adaptations of those embodiments will occur to those skilled in the art. It is to be expressly understood, however, that such modifications and adaptations are within the scope of the present invention, as set forth in the following claims.

The application's sequence listing, which the Patent Office published only in electronic form, follows.

SEQUENCE LISTING (197 sequences)

SEQ ID NO: 1 - DNA, 12010 bp, Homo sapiens
  misc_feature (1)..(12010): n = a,c,t, or g
ctggaggaggacaaagggatgggggagtatcccccactcctcctacctcctggggtgacctgccttccttgtctttagacccgccctcgtctccaaggcaactcagcctttcctcagtccctcagaggcagccaccttctggaagtgggaactggggggactggatgtctgggtctcaggaaggcagagcagggataactgggcccaagatgccctgaacctgataagaggtggcagtcgagtccctcaggactccagggcctggagacttcagtacagggctctgagaccagtacaggttaggatagcttttcctgcagcaggggaggggagagtagttacttgggtttgtaaggagatgccatttagaatagttttatgtggggtaagcttcctgggcctgaggaacagagtagggattttcaaactttaatgggcacaggtcacctgggaattgtgttaaaaggcagatttggattgaacaggtcaagggtgagcctgagattctgatttcttccatgcttccaggtattgctgatggtccagggaccaccctgggcctagagggctatagggggacagtaagactagaaggtgctggggtcccctctgcccttctcttagaattctggactcctatgtgggagggcaacagggtgagctggtccaggcttatctgatgtttaattctatcatatcctcaacaaggaattgcccaacctttcctgggacatatttattttttaaaagtccaaatgattttcatattcttttacatatcttatgattttacataaatgcatttatgttacaagatttagaaaaatagtacaatcaacctgtctttttaaatttgcttttcttttgccccgttcatgttaactcttgttatattgtatgctattgttatattctattatatattctctccttctagacgtacacacaggtatatatacaaacatgggtgcttgtttattctattttcaaaaggtgggagattttttatacttctgttgcttgcttttcatattcaacagatatacatggaaatcacacaaagttaggaatatattgcctctttgttacttttcatagctgcatagtagtcaataaaccttattttttttaattccagcctgtcccctgtgggcattcacatatcttacagatttatgtcttacaaaaggtaccataataaacatctttgaaatcttcttttttatttttatttttcactttttttaaaagagatggggtctcactatgttcaccaggctggtctctaactcctggcctcaagtgatcctcccatctcggcctcccaaagtgctggggttacaggcatgagccaccagacccagacctgcacatatgttcttacttcctggtgcttctctctcgagggaatgctgggtcgaagaggatgtgcatttttaattataatagacattgctagattgctttccaaatagaagataacactcatttctgccattgagcatggtgcctcccttttcatcactttctaccacttttatatgttacagccttaaaaaaatatcttgtcagtctgcttggtatttccctgaggctagtgaatttgaccattaaaaaaaatgtttgttggcaatttggctttgcttttctgtgaaatgactatccacattctttggctgtttctttattgggttacttatatattttttcttgtcagttcctaaggggccttagtttattgtagttattaaaccttttcctgttgtatgtgttataaacattttttgcacacttgttgtttgttctaagccgttgtttatggggatattttgcccattcctgattggggaaatggggctttaggaagttatttaactgatctctgccctagtttcttcatgtgttaaatatggatagtaatagtatctaccttatgaagtgactgtgaagataaaattatggattctgtttaagggtttaggccagtgtctggcacaggggaagcattctaaaaatatagctgatgctgttaaacaatgactgttgttgttgttttactgttattatccccaaagcggcccattctgtctgttgctgtcagctatgactcagtcccctgattaacttacgcaccacccattttatcccctgcagagatgctgcccccacccccttaggcccgagggatcaggagctatgggaccagaggccctgtcatctttactgctgctgctcttggtggcaagtggagatgctgacatgaagggacattttgatcctgccaagtgtcgctatgccctgggcatgcaggaccggaccatcccagacagtgacatctctgcttccagctcctggtcagattccactgccgcccgccacagcaggtacttggcacacctggcacacttgtagctgccccgagaggagctcctgggacctctacttcccctccaacccctctgcccacgccagtgaaacccctgcaggctgagggggcaaatgaagtggggtttaaatactggagatggaggcagacctggggccagatgttctctgtgcccctcttcaccctcaggttggagagcagtgacggggatggggcctggtgccccgcagggtcggtgtttcccaaggaggaggagtacttgcaggtggatctacaacgagtgcacctggtggctctggtgggcacccagggacggcatgccgggggcctgggcaaggagttctcccggagctaccggctgcgttactcccgggatggtcgccgctggatgggctggaaggaccgctggggtcaggaggtgatctcaggcaatgaggaccctgagggagtggtgctgaaggaccttgggccccccatggttgcccgactggttcgcttctacccccgggctgaccgggtcatgagtgtctgtctgcgggtagagctctatggctgcctctggaggggtgagtggctcagcttcctgggaatctgtttcctgagcaggggactggagggtggggagtgtggcgaatggacattttaggatcccttctcctggtgggaagctgtcactctgaggagggggctagccagcattgtctcctccatgccaatgagccagtggagagatacaagaagggacctgaaacctgcccaggcctgatgaagggatgggggatggagtcttagtgcctctgacccccaccctcttattttttcccagatggactcctgtcttacaccgcccctgtggggcagacaatgtatttatctgaggccgtgtacctcaacgactccacctatgacggacataccgtggggggtaagaaaggcccctgcaggatatggagtttggggtgggagggaggactctgtgtgtgtgtgtgtgtgtgtgtgtctgtgtgtgtgtgagtgtgtgtgtgtaggggggctggtaagtagggtggggagtgagatggaagagcagagaagagggatgggtaaggtgggncctcaaagggtaacactagggtgaccactagcccgtatgacactggatgtagaagagtcacccctttgctaacacacattgttggaaattgctccaataaatatacacatcatagattgaaatggtgccccttagaggtggtgcctttgtgctggatgtgacctgcaaggtacctgtagtgctggggtggggtggagagaggagaagggccagctgcatgagtgtgaggcgggatgggaatgggactagtggatgggagccaggctggccatgccactgtgccggagggtggcggagcagaatgcctggatgtcaagaccctcttcccttccaacctcctcttccttggtcccctcttctccggactgcagtatgggggtctgggccagctggcagatggtgtggtggggctggatgactttaggaagagtcaggagctgcgggtctggccaggctatgactatgtgggatggagcaaccacagcttctccagtggctatgtggagatggagtttgagtttgaccggctgagggccttccaggctatgcaggtgagtgagtccggctctcgaggagggctctgaagccatgcagggtgccgttggggtgcccccaccactcctagccttgaccctgtgccctcttcccttccccccaggtccactgtaacaacatgcacacgctgggagcccgtctgcctggcggggtggaatgtcgcttccggcgtggccctgccatggcctgggagggggagcccatgcgccacaacctagggggcaacctgggggaccccagagcccgggctgtctcagtgccccttggcggccgtgtggctcgctttctgcagtgccgcttcctctttgcggggccctggttactcttcagcgaaatctccttcatctctggtaagccctggagtagcccagtctccagtccctgaaattgacaactgagttcattcctaaccctgcagtgtccctaaaatactcattcctcgcattatatctacccatcacccaccgaaacttctcaattaggggtgccccaaataacttgagcccctctctgcctcttgttctctgcgtatccatctttcctttgtaagccccttgcccgtgactattattgagccagtatgacagtactggttgttaaaatattgaaatacttctgtattagttgagaaatagcctcttctctaagcctccagatacctgtcctccacctccccacaatccagcaactatagggttaacacccaccacagctgggtgttccaggaccctgctcccccagcccccactggtcagtggttgcctattgagaatcacccatgcttctgctcctttgcacaacagtccactgcctctgcctcccttgggtctcctcctcatttacctccctcctttctttttgttccttctccccagatgtggtgaacaattcctctccggcactgggaggcaccttcccgccagccccctggtggccgcctggcccacctcccaccaacttcagcagcttgggtgagcaatcttgggtgggcgtgtggaccctctgcacccttctccctgggcctccccctcggctagggtgggaccctcctgtggtgctgaccctgctgcctccaccagagctggagcccagaggccagcagcccgtggccaaggccgaggggagcccgaccgccatcctcatcggctgcctggtggccatcatcctgctcctgctgctcatcattgccctcatgctctggcggctgcactggcgcaggctcctcagcaaggtgggcacagccgtggcatgtggagtggcggggggaggccaggccccagcacgagccagcgtccagtgggacctgcagggcacagcccactagcatcccaagaggagggcttagtaaagagaccacttacaccatgtcaaagagggtatggggctcacagggagggctgctccccagctctgggtctgctcagcggagaggagcaaataccacgacccagaggagagagtctgtggagagggcaccttgacaggggcagtagactttggtcctgggatgcagctggtcccgttatctacccctcagggagggcctgggagagtagatgccctgacctcacttttctgtgccaaactcctgctgggctcctctctggctaaacccaaaccaggcctgttgttgcagtgtacactggtcacccttggggcagaagcagggtagagacaggcagagagtggggttggaggggcaaagggaagacgtctgncacaccccaagccacgtcttccggctggagtccagtggcagtaatatacattaaggttgatgactggacacggtggctcatgcctgtaatcctagcactttgggagaccgaggcgggaggatcacctgaggtcaagagttcgagaccagcctgaccaacatggtgaaatcccatctctactaagaataccaaattagccaggcatggtggctgatgcctgtaatcccagctactcaggaggctgaggcatgaatctcttgaacctgggaggcgaaggttgcagtgagctgagatcatgccatttcacttcagcctgggcgacaagagccaaattccatctccaaaaaacaaacaaaccaaaaaaaacggttgatagttatggactgggcagatgagggttagaatctcattgtggggcagggaagttacctccatgctcttgagcttcactttctctgcctgtaagatggtgctgatagtatccacagctgtagggctcttgtgagggctgagggagggaacgcagggatggacacagcagagggccaggccgtgtgtgctgagcaacacgggtgatgcctcccatccctatgacaaggctgaacggagggtgttggaagaggagctgacggttcacctctctgtccctggggacactatcctcatcaacaaccgcccaggtcctagagagccacccccgtaccaggagccccggcctcgtgggaatccgccccactccgctccctgtgtccccaatggctctggtaagacctgccttgttccagtcgcacctctgtcctctctgctgttttcttattgtatccctttcccattctctttttttcctgtcttccccagtttccacttgttttcttctttctgtgcccctggttactgtctatatcactctttggtccctaccatgtagtctctctcaagagttccccatgtattacccatagtcccccgtggtgctatcttgtctgtgtcccacagacatctctctatctttgttgtaccctctcattgtgtctccctggcccctttgatttgtattagactcaccatgtttggttccttcatctatcctccatcacccatccttccatccatagtcatacatccttgcatccatccatcaatcttccatcatctgtctttctatctatattcataaatctattcatccatccatccacccacccatatccatcatccatctatccatctatattcacacatccatctttccatctgttatccatccatccaacaaacatctgtttaccatccatccatctattcatacgtcccatctgtccatgcattcattatccagccagccgtccgtcactctgcagatccttgttttatcctgtctgtctcttaatgcaatcatcccatcagccctggtcttgccctattcaaggtctccctgtctgtctagccttgagtctcatcccttccccgtgtttcccctcctccttctcccgacagcgttgctgctctccaatccagcctaccgcctccttctggccacttacgcccgtccccctcgaggcccgggcccccccacacccgcctgggccaaacccaccaacacccagggtaagcccctctgcccctgggctccgccaggctccccatacctctactggggcagggaaaagccctcacaccttgcacttcctcctctccccactgtggcctattctgctctcctgagctcccaaggaggaagctcttgtgcccttagctcatctctgctgctgcttgctcttttttaaggtcccccccttgagctgaggagtagaaagcttactggtccccagctcttctccctcctcctcttccacgccatctcttcagctctccagagctagacaggaggttgctgtggtggccccagactatagtaactcctcctttattctccactctctctagagctgcgaggaggagggctctcaccccgggcgcttgccctttccctcacatgtgtcctctctctgcagtcccagaggtgaaggctcatgccccaaccctttccatctgcccctcttctcctcagtgttgccttctcattgtggccccttccccagggctaagaggggacagctctgcttcctctcctgtctgtagacaacttgtgttggggctgtgagcagctgttaccctccctcctctctgtgtgcctctgtctctgcttgttgttgagcttggtgtgttgggttgaaagggttgggagggcttggccccagggggagccaggctgaaagccacgggagagcagctaagtgaaggggagggagctgtggtgaacgggacaagggtttggaaggtggagggtgcctggatgctgggaccatcctgaggcgggagaattcctggggaggaattcttcttccagccaagatttatctcacagtctcttgagagaccctagggaggccctaaaagagtaagactttatgacagttttgctcaaccatattcattgccttgaaaagctctggaatagctaactctcgtcccatgccagtgtcttcctggtttgaggttggcgcatggaatactgggaagatacagcatagacccagtctctcactcaaccgggagacacagggccctccgggaggctgaggtgtggggaactatagctcttgggctgttcctgatgcctcgtcctgtcttctttcccctcacccctgcagcctacagtggggactatatggagcctgagaagccaggcgccccgcttctgcccccacctccccagaacagcgtcccccattatgccgaggctgacattgttaccctgcagggcgtcaccgggggcaacacctatgctgtgcctgcactgcccccaggggcagtcggggatgggccccccagagtggatttccctcgatctcgactccgcttcaaggagaagcttggcgagggccagtttggggaggtaaggagggtgcctacccagtgtctggccctattgtgtgctctgatgccatgcctgcgcatccccctagccaggaaccttagtcatttgtaaccgtgttaatccgtttgaccctgtgaccgcctagcaaacgaacttctttctccaggtgcacctgtgtgaggtcgacagccctcaagatctggttagtcttgatttcccccttaatgtgcgtaagggacaccctttgctggtagctgtcaagatcttacggccagatgccaccaagaatgccaggtgaggaccagggatggcatctggaagaagggaggggaggccgcgaagagtggcgagccatctagagagaacaatggcagagcccaacagaggggtggtatctctgggaggggatttacatgtacgctgggggtggggacgcctggtctgcctgaggtggcgcaggggggtggnggcgctgcggaaggtgtaggccgnccactcggcattcctcttcagcttctcctttgttctccaggaatgatttcctgaaagaggtgaagatcatgtcgaggctcaaggacccaaacatcattcggctgctgggcgtgtgtgtgcaggacgaccccctctgcatgattactgactacatggagaacggcgacctcaaccagttcctcagtgcccaccagctggaggacaaggcagccgagggggcccctggggacgggcaggctgcgcaggggcccaccatcaggtacctgtttacccaggctgggccatgctcagaattcccccaggggatctcctcctctcccctcgcttcagcctgggggaaaagaggggagcgtgggggtgggaagggagagaggttccaggagggcctgggataaggaatgtgtgacaagttaacccaggaatatggacagaaaggctggaggtgactatgcaagagtggtgaagggacttgggccctgccatgacgtcccttctgctttctctcaccctcactcccctctgagtccagattggggagcacaataaaagaagagccccctagtgttggccaggcctgggagattgagagagaagtgacccttggcctcacgtgggcattccacctccacatggggagccagagtgaccgggcccggggagtgggctctctctcctctcctggatgggaatctgcgaagctgcccccagtgaccttctgtcggttcccttctcagctacccaatgctgctgcatgtggcagcccagatcgcctccggcatgcgctatctggccacactcaactttgtacatcgggacctggccacgcggaactgcctagttggggaaaatttcaccatcaaaatcgcagactttggcatgagccggaacctctatgctggggactattaccgtgtgcagggccgggcagtgctgcccatccgctggatggcctgggagtgcatcctcatggtgagcagcccgaggacagccaggttggagcagggcaggtgggagaacactggccgccactcacagccctggtctccatcagtcacacactttctctgggttgcatttacagaatctcatctataatatgaggttctcctagcccaagggactggggaaagcaggagccgcagtgtgatgggcaagaatccaggagccaagagtgggtactggggatggagacagcgtggcagagagctcaagagatgaggttgggggaggaagctggagatagaaggggttgggtagggagaccgaaggtcaggaccagaaagtgggggttgggtggagaggaaggaggagcagaaggaagaggttggtccagggccccctggagagaggaaccagattcatggagacgganaagccagagccccaagggagaggagttggnaaaaggtgcccaccggaggagagtggagagcctgncntcaggagggatcagncctgagtggagcccagagtggatctggggcttccaataggaagggaggggggtcaaccgttgcctgatgtcccctgtctgtttttgctgccttcctctgcatcccaggggaagttcacgactgcgagtgacgtgtgggcctttggtgtgaccgtgtgggaggtgctgatgctctgtagggcccagccctttgggcagctcaccgacgagcaggtcatcgagaacgcgggggagttcttccgggaccagggccggcaggtcagagtggaggagagggaagatgggtccgagncgggggacagaaggggcagagttttcatcttggagactaaagaataattgttccctgactctcaaccacacttccncaatncaggtgtacctgtcccggccgcctgcctgcccgcagggcctatatgagctgatgcttcggtgctggagccgggagtctgagcagcgaccacccttttcccagctgcatcggttcctggcagaggatgcactcaacacggtgtgaatcacacatccagctgcccctccctcagggagcgatccaggggaagccagtgacactaaaacaagaggacacaatggcacctctgccccttcccctcccgacagcccatcacctctaatagaggcagtgagactgcaggctgggcccacccagggagctgatgccccttctccccttcctggacacactctcatgtccccttcctgttcttccttcctagaagcccctgtcgcccacccagctggtcctgtggatgggatcctctccacccacctctagccatcccttggggaagggtggggagaaatataggatagacactggacatggcccattggagcacctgggccccactggacaacactgattcctggacaggtggctgcgcccccagcttctctctccctgtcacacactggaccccactggctgagaatctgggggtgaggaggacaagaaggagaggaaaatgtttccttgtgcctgctcctgtacttgtcctcagcttgggcttcttcctcctccatcacctgaaacactggacctgggggtagccccgccccagccctcagtcaccccccacttcccacctgcagtcttgtagctagaacttctctaagcctatacgtttctgtggagtaaatattgggattggggggaaagagggagcaacggcccatagccttggggttggacatctctagtgtagctgccacattgatttttctataatcacttgggtttgtacatttttggggggagagacacagatttttacactaatatatggacctagcttgaggcaattttaatcccctgcactaggcaggtaataataaaggttgagttttccac

SEQ ID NO: 2 - DNA, 987 bp, Homo sapiens
ccgggatctgctttcaatccgccatcccatggagcatggcatcgtcaaggattggaacgacatggaacgcatttggcaatatgtctattctaaggaccagctgcagactttctcagaggagcatcctgtgctcctgactgaggcgcctttmaacccacgaaaaaaccgggaacgagctgccgaagttttcttcgagaccttcaatgtgcccgctcttttcatctccatgcmagcygtactcagcctttacgctacaggcaggaccacaggggtggtgctggattctggggatggrgtcacccatgctgtgcccatctatgagggctttgccatgccccactccatcatgcgcatcgacatcgcgggccgggacgtctctcgcttcctgcgcctctacctgcgtaaggagggctacgacttccactcatcctctgagtttgagattgtcaaggccataaaagaaagagcctgttacctatccataaacccccaaaaggatgagacgctagagacagagaaagctcagtactacctgcctgatggcagcaccattgagattggtccttcccgattccgggcccctgagttgctcttcaggccagatttgattggagaggagagtgaaggcatccacgaggtcctggtgttcgccattcagaagtcagacatggacctgcggcgcacgctttttctctaacattgtcctctcaggaggctctaccctgttcaaaggttttggtgacaggctcctgagtgaagtgaagaaactagctccaaaagatgtgaagatcaggatatctgcacctcaggagagactgtattccacgtggattgggggctccatccttgcctccctggacacctttaagaagatgtgggtctccaaaaaggaatatgaggaagatggtgcccgatccatccacagaaaaaccttctaatgtcgggacatcatcttcacctctctctgaagttaactccactttaaaa

SEQ ID NO: 3 - DNA, 2808 bp, Homo sapiens
ggaaagcacctgtgagcttggcaagtcagttcagagctccagcccgctccagcccggcccgacccgaccgcacccggcgcctgcctcgctcgggctccccggccagccatgggcccttggagccgcagcctctcgggcctgctgctgctgctgaggtctcctcttggctctcaggagcggagccctcctccctgtttgacgcgagagctacacgttcacggtgccccggcgccacctgagaagaggccgcgtctgggcagagtgaattttgaagattgcaccggtcgacaaaggacagctattttcctgacaccgattccgaaagtgggcacagatggtgtgattacagtcaaaaggcctctacggtttcataacccaacagatccatttcttggtctacgctgggactccacctacagaaagttttccaccaaagtcacgctgaatacagtggggcaccaccaccgccccccgccccatcaggcctccgtttctggaatccaagcagaattgctcacatttcccaactcctctcctggcctcagaagacagaagagagactgggttattcctcccatcagctgcccagaaaatgaaaaaggcccatttcctaaaaacctggttcagatcaaatccaacaaagacaaagaaggcaaggttttctacagcatcactggccaaggagctgacacaccccctgttggtgtctttattattgaaagagaaacaggatggctgaaggtgacagagcctctggatagagaacgcattgccacatacactctcttctctcacgctgtgtcatccaacgggaatgcagttgaggatccaatggagattttgatcacggtaaccgatcagaatgacaacaagcccgaattcacccaggaggtctttaaggggtctgtcatggaaggtgctcttccaggaacctctgtgatggaggtcacagccacagacgcggacgatgatgtgaacacctacaatgccgccatcgcttacaccatcctcagccaagatcctgagctccctgacaaaaatatgttcaccattaacaggaacacaggagtcatcagtgtggtcaccactgggctggaccgagagagtttccctacgtataccctggtggttcaagctgctgaccttcaaggtgaggggttaagcacaacagcaacagctgtgatcacagtcactgacaccaacgataatcctccgatcttcaatcccaccacgtacaagggtcaggtgcctgagaacgaggctaacgtcgtaatcaccacactgaaagtgactgatgctgatgcccccaataccccagcgtgggaggctgtatacaccatattgaatgatgatggtggacaatttgtcgtcaccacaaatccagtgaacaacgatggcattttgaaaacagcaaagggcttggattttgaggccaagcagcagtacattctacacgtagcagtgacgaatgtggtaccttttgaggtctctctcaccacctccacagccaccgtcaccgtggatgtgctggatgtgaatgaaggccccatctttgtgcctcctgaaaagagagtggaagtgtccgaggactttggcgtgggccaggaaatcacatcctacactgcccaggagccagacacatttatggaacagaaaataacatatcggatttggagagacactcgcaactggctggagattaatccggacactggtgccatttccactcgggctgagctggacagggaggattttgagcacgtgaagaacagcacgtacacagccctaatcatagctacagacaatggttctccagttgctactggaacagggacacttctgctgatcctgtctgatgtgaatgacaacgcccccataccagaacctcgaactatattcttctgtgagaggaatccaaagcctcaggtcataaacattcatgatgcagaccttcctcccaatacatctcccttcacagcagaactaacacacgggcgagtgcccaactggaccattcagtacaacgacccaacccaagaatctatcattttgaagccaaagatggccttagaggtgggtgactacaaaatcaatctcaagctcatggataaccagaataaagaccaagtgaccaccttagaggtcagcgtgtgtgactgtgaaggggccgccggcgtctgtaggaaggcacagcctgtcgaagcaggattgcaaattcctgccattctggggattcttggaggaattcttgctttgctaattctgattctgctgctcttgctgtttcttcggaggagagcggtggtcaaagagcccttactgcccccagaggatgacacccgggacaacgtttattactatgatgaagaaggaggcggagaagaggaccaggactttgacttgagccagctgcacaggggcctggacgctcggcctgaagtgactcgtaacgacgttgcaccaaccctcatgagtgtcccccggtatcttccccgccctgccaatcccgatgaaattggaaattttattgatgaaaatctgaaagcggctgatactgaccccacagccccgccttatgattctctgctcgtgtttgactatgaaggaagcggttccgaagctgctagtctgagctccctgaactcctcagagtcagacaaagaccaggactatgactacttgaacgaatggggcaatccgttcaagaagctggctgacatgtacggaggcggcgaggaccactaggggactcgagagaggcggcccagaccatgtgcagaaatgcagaaatcagcgttctggtgtttt

SEQ ID NO: 4 - DNA, 1478 bp, Homo sapiens
gtgagacagcagtgaagccgccggcacctccgctgccgcagatgatggaagggaacgggaacggccatgagcactgcagcgattgcgagaatgaggaggacaacagctacaaccggggtggtttgagtccagccaatgacactggagccaaaaagaagaaaaagaaacaaaaaaagaagaaagaaaaaggcagtgagacagattcagcccaggatcagcctgtgaagatgaactctttgccagcagagaggatccaggaaatacagaaggccattgagctgttctcagtgggtcagggacctgccaaaaccatggaggaggctagcaagcgaagctaccagttctgggatacgcagcccgtccccaagctgggcgaagtggtgaacacccatggccccgtggagcctgacaaggacaatatccgccaggagccctacaccctgccccagggcttcacctgggatgctttggacttgggcgatcgtggtgtgctaaaagaactgtacaccctcctgaatgagaactatgtggaagatgatgacaacatgttccgatttgattattccccggagtttcttttgtgggctctccggccacccggctggctcccccagtggcactgtggggttcgagtggtctcaagtcggaaattggttgggttcattagcgccatcccagcaaacatccatatctatgacacagagaagaagatggtagagatcaacttcctgtgtgtccacaagaagctgcgttccaagagggttgctccagttctgatccgagagatcaccaggcgggttcacctggagggcatcttccaagcagtttacactgccggggtggtactaccaaagcccgttggcacctgcaggtattggcatcggtccctaaacccacggaagctgattgaagtgaagttctcccacctgagcagaaatatgaccatgcagcgcaccatgaagctctaccgactgccagagactcccaagacagctgggctgcgaccaatggaaacaaaggacattccagtagtgcaccagctcctcaccaggtacttgaagcaatttcaccttacgcccgtcatgagccaggaggaggtggagcactggttctacccccaggagaatatcatcgacactttcgtggtggagaacgcaaacggagaggtgacagatttcctgagcttttatacgctgccctccaccatcatgaaccatccaacccacaagagtctcaaagctgcttattctttctacaacgttcacacccagacccctcttctagacctcatgagcgacgcccttgtcctcgccaaaatgaaagggtttgatgtgttcaatgcactggatctcatggagaacaaaaccttcctggagaagctcaagtttggcataggggacggcaacctgcagtattacctttacaattggaaatgccccagcatgggggcagagaaggttggactggtgctacaataa

SEQ ID NO: 5 - DNA, 1846 bp, Homo sapiens
aaaagtgcctttgttggcctgggctcaggaatccagagaaactggtcaggaggaggccccagtgacaaaaacccctccctctgcccccgcccctctgccagagccatataactgctcaacctgtccccgagagagagtgccctggcagctgtcggctggaaggaactggtctgctcacacttgctggcttgcgcatcaggactggctttatctcctgactcacggtgcaaaggtgcactctgcgaacgttaagtccgtccccagcgcttggaatcctacggcccccacagccggatcccctcagccttccaggtcctcaactcccgtggacgctgaacaatggcctccatggggctacaggtaatgggcatcgcgctggccgtcctgggctggctggccgtcatgctgtgctgcgcgctgcccatgtggcgcgtgacggccttcatcggcagcaacattgtcacctcgcagaccatctgggagggcctatggatgaactgcgtggtgcagagcaccggccagatgcagtgcaaggtgtacgactcgctgctggcactgccgcaggacctgcaggcggcccgcgccctcgtcatcatcagcatcatcgtggctgctctgggcgtgctgctgtccgtggtggggggcaagtgtaccaactgcctggaggatgaaagcgccaaggccaagaccatgatcgtggcgggcgtggtgttcctgttggccggccttatggtgatagtgccggtgtcctggacggcccacaacatcatccaagacttctacaatccgctggtggcctccgggcagaagcgggagatgggtgcctcgctctacgtcggctgggccgcctccggcctgctgctccttggcggggggctgctttgctgcaactgtccaccccgcacagacaagccttactccgccaagtattctgctgcccgctctgctgctgccagcaactacgtgtaaggtgccacggctccactctgttcctctctgctttgttcttccctggactgagctcagcgcaggctgtgaccccaggagggccctgccacgggccactggctgctggggactggggactgggcagagactgagccaggcaggaaggcagcagccttcagcctctctggcccactcggacaacttcccaaggccgcctcctgctagcaagaacagagtccaccctcctctggatattggggagggacggaagtgacagggtgtggtggtggagtggggagctggcttctgctggccaggatagcttaaccctgactttgggatctgcctgcatcggcgttggccactgtccccatttacattttccccactctgtctgcctgcatctcctctgttccgggtaggccttgatatcacctctgggactgtgccttgctcaccgaaacccgcgcccaggagtatggctgaggccttgcccacccacctgcctgggaagtgcagagtggatggacgggtttagaggggaggggcgaaggtgctgtaaacaggtttgggcagtggtgggggagggggccagagaggcggctcaggttgcccagctctgtggcctcaggactctctgcctcacccgcttcagcccagggcccctggagactgatcccctctgagtcctctgccccttccaaggacactaatgagcctgggagggtggcagggaggaggggacagcttcacccttggaagtcctggggtttttcctcttccttctttgtggtttctgttttgtaatttaagaagagctattcatcactgtaattattattattttctacaataaatgggacctgtgcacaggaaaaaaaaaaaaaaaaaaaaaaaa

SEQ ID NO: 6 - DNA, 585 bp, Homo sapiens
  misc_feature (1)..(585): n = a,c,t, or g
ttccttgggcttctccttctccttgagcgcttcggcctcctccttctcctcctcagcctggccgctctctgactccgactcagactctgacacgctgccctcgtcaaagctgtcgtcaccactgtgcttccggttccgcttcttgctactctttttggcttccttctcggagtcttctttcttctcttccttgtccccatcaccctccgacttctttgttttgtcatcattagaactgtcattctcagcctgcttgccgtcttccttcttctcatccttgtcgttggttttgcgctccccgtcccctaggcctgctccagcccgtccttcttctttcttgctgggctccccaggctttcctgcctgctcctcctcctcctcctgctccaggatgcgaagatcattctccgtgcctccttccatcttaatcacggctgcatccagcatcttgacaatggcatcagctntgtctatgtccaggagaaggttatcaaaccagccagtctccatgagggacaggaagaccctcagtcgggtttgcagggccccccgggcctnctgccgacgcttccccacctcatctgg

SEQ ID NO: 7 - DNA, 2982 bp, Homo sapiens
gcctcggaggcgtgggtgacgcaggcgcagcgcgggctgcgcgcgctactgcccatccccggttgtcccacttttgttcgcctctcttcggccctctactcaagagctccgtctccgtctcgccctcctcgaagtcctcgtcgcgcgcccgcgacccaggtcgccctgaaatctagcccgtccgagcgcgagtccaacgccgcggccgcaccaaggccccctcagaccgtgccatgggtgacagtgatgacgagtacgatcgaaggcgcagggacaagttcagaagagagcgcagcgactacgaccgttcccgcgagagagatgaaagacgtcgaggggacgattggaatgacagagagtgggaccgtggccgtgagcgccgtagtcggggtgaatatcgggactatgaccggaatcggcgagagcgcttctcgccacctcgccacgaactcagcccgccacagaagcgcatgaggagagactgggatgagcacagctctgacccataccacagtggctatgagatgccctatgctggggggggtgggggcccaacttatggcccccctcagccctggggccaccctgacgtccacatcatgcagcaccatgtcctgcctatccaggccaggctgggcagcattgcagagattgacctgggtgtgccgccgcccgtgatgaagaccttcaaggagtttctcctctccctggatgactcggtggatgagacggaggccgtcaagcgctataatgactacaagctggatttccggaggcaacagatgcaggatttcttcctggcgcacaaagatgaggagtggtttcggtctaagtaccacccagatgaggtggggaagcgtcggcaggaggcccggggggccctgcaaaaccgactgagggtcttcctgtccctcatggagactggctggtttgataaccttctcctggacatagacaaagctgatgccattgtcaagatgctggatgcagccgtgattaagatggaaggaggcacggagaatgatcttcgcatcctggagcaggaggaggaggaggagcaggcaggaaagcctggggagcccagcaagaaagaagaaggacgggctggagcaggcctaggggacggggagcgcaaaaccaacgacaaggatgagaagaaggaagacggcaagcaggctgagaatgacagttctaatgatgacaaaacaaagaagtcggagggtgatggggacaaggaagagaagaaagaagactccgagaaggaagccaaaaagagtagcaagaagcggaaccggaagcacagtggtgacgacagctttgacgagggcagcgtgtcagagtctgagtcggagtcagagagcggccaggctgaggaggagaaggaggaggccgaagcgctcaaggagaaggagaagcccaaggaagaagaatgggagaagcccaaggacgccgcggggctggagtgcaagccgcggccgctgcataagacctgctccctcttcatgcgcaacatcgcgcccaacatctcccgggccgagatcatctccctttgtaaaaggtacccaggctttatgcgggtggcgctctcagagccccagccagagaggaggtttttccgtcgtggctgggtgaccttcgaccgcagtgttaacattaaagagatctgttggaacctgcagaacatccgtctccgggagtgtgagctgagccctggtgtgaacagggacctgacccggcgcgttcgcaacatcaacggcatcacccagcacaagcagattgtgcgcaacgacatcaagctggcggccaagctgatccacacgctggatgacaggacacagctttgggcctcagaaccagggacgcctcccctgcccacgagcctgccctcgcaaaacccgatcttgaagaatatcaccgactacctgatcgaggaagtaagcgccgaggaggaggagctgctggggagcagcgggggcgctcctcctgaggagcctcctaaggaagggaacccggcagagatcaacgtggagcgggatgagaagttgattaaggtcttggacaagctcctcctttacctgcgcatcgtgcattccttggattattacaacacctgtgagtaccccaacgaggacgagatgcccaatcgctgtgggatcatccacgttcgggggcccatgccacccaaccgcatcagtcacggggaagtgctggagtggcagaagacttttgaggagaagctcacgccgttgctgagtgtgcgggagtcactctcagaggaagaggcccagaagatggggcgcaaagacccagagcaggaagtggagaagttcgtcacctccaacacgcaggaactgggcaaggataagtggctgtgtcctctcagtggcaagaaattcaagggtcctgagtttgtgcgcaaacatatcttcaacaagcatgcagagaaaattgaggaagtgaaaaaggaagtcgcgttttttaacaacttcctcactgatgctaagcgcccagctctgcctgagatcaagccagcccagccacctggccccgcccagatactccccccaggtttgaccccaggactcccctacccacaccagactccccagggcctgatgccctatggtcagccccggcccccgatcttgggctatggagctggtgctgtccgccctgcagtccccacaggaggccctccatacccccatgccccgtatggtgctggtcgagggaactatgatgccttccgaggccagggaggttatcctgggaaacctcgcaacaggatggttcgtggagacccaagggccattgtggaatatcgggacctggatgccccagacgatgttgatttcttttgagccgtcccccgttcctcagtcctgtatcatccatacttgtactaccttgtcctatgaagctctgagaattttttgtacgatcagccttactgctaataaaagcacttccacagggaaaaaa

SEQ ID NO: 8 - DNA, 447 bp, Homo sapiens
ccaaaaatactccaggctctttctcttataagtcatttttttttctcctgtaaaaagcccccctgccctgccttcttacataaagcacttactacgcgccaaagtgcccttgagacctaagatctgaagcaactatgagaaaggtacagagggagagagagagagaaagagagcacgccagtgagaaagcgagcgcgagcgcgagcgcaaggggaggagagggtgggagagggcggaagggggaaagctgtccgtgggagattgtgtcttcatgtccacggggctgcatctcttgatggtgcactgaaaaagcagagctcaccagacagagtggaaaggcagggggaggggcagggagcaacagaaggaagagacaacaagcccaagacagcttccatctcagacggaaggcccccagaagatagaattccagccgactgaaaaacc

SEQ ID NO: 9 - DNA, 539 bp, Homo sapiens
cctaacaattccgacatggttcacattcatcaagactaaagccatccctcgggagagaccctggctaccgacattcatgtgaagattgtctagtgaattgcttgcgacacatcccaccatcgccatcccacagttgttactggtttgtcaagcataagccatgccctaacgacaggctggcctttgacagcagatgttctacagagatgagtgcatttttatttgggtggggtagagatggtgtcttttggaccccaacaaactgtactctaaacttcacagagtccttgggacgggaaatcatcacctcatccagggacactggctatcttcaaagatgggtgcggcgactccacatcactgtgaccttctttgctaagtgtttcggaaacagaacacgaataaaatactcatctcagaaccagagcactttttggtcttctgggacatgaataattcacatacccaagtggaggccaatcaatgatctgagaatgatcaacgcaccctggcttttgcaggtggtcctggcacgttcc

SEQ ID NO: 10 - DNA, 3504 bp, Homo sapiens
ctcccacggtctctagttcgcgttatggccgctgccgcggctgtggaggcggcggcgcctatgggtgccctatggggcctcgtgcacgacttcgtcgtgggtcagcaagagggccccgctgaccaggtggctgcagatgtgaaatctggcaactatacagtgttacaagttgtggaagcccttgggtcctctctagagaatccagaaccccgaactcgggcacgaggaatccagcttttgtcacaggtgctactccactgtcacaccttgctcctggagaaggaagtggtacacctgatactgttctatgagaaccggctgaaggaccatcatcttgtgatcccatctgtcctgcagggtttgaaggcacttagcctgtgtgtggccctgcccccagggctggctgtttctgtgcttaaagccatcttccaggaagtgcatgtacagtccctgccacaggtggaccgacacacagtctacaatatcatcaccaattttatgcgaacccgggaagaagagctaaagagcctaggagctgacttcacctttggcttcatccatgtgatggatggggaaaaggatccccgtaatcttctggtggccttccgcatcgtccatgacctcatctccagggactatagcctgggaccctttgtggaggagttgtttgaagtgacatcctgttatttccctatcgattttacccctccacctaatgatccccatggtatccagagagaagacctcatcctgagtcttcgcgctgtgctggcttctacaccacgatttgctgagtttctgctgcccctgttgattgagaaagtggattctgaggttctgagtgccaagttggattctctacagactctgaatgcttgctgtgctgtgtatggacagaaggaactgaaggacttcctccccagcctttgggcttctatccgcagagaggtgttccagacggcaagtgagcgggtggaggcagagggcctggcggccctccactccctgactgcgtgtttgtctcgctctgtgctgagggctgatgctgaggacctccttgactccttccttagcaacattctacaggactgcagacaccacctgtgtgaaccggacatgaaactggtgtggcctagtgccaagctgttgcaggcagctgcaggtgcatctgcccgggcctgtgactctgacaccagcaatgtaccgcctttactgctggaacagttccacaagcacagtcagagcagccagcggcggacaatccttgaaatgctcctgggtttcttgaagctgcagcagaaatggagctatgaagacaaagatcaaaggcctctgaatggcttcaaggaccagctgtgctcactggtattcatggctctaacagaccccagcacccagcttcagcttgttggcatccgtacactgacagtcttgggtgcccagccagatctcctatcttatgaggacttggagctggcagtgggtcacctgtacagactgagcttcctgaaggaggattcccagagttgcagggtggcagcactggaagcatcaggaaccctggctgctctctaccctgtggccttcagcagccacctcgtacccaagctcgctgaggagctgcgtgtaggggagtcaaatttgactaacggagatgagcccacccaatgctcccggcatctgtgctgtctgcaagccttgtcagctgtatcaacacatcccagcatcgtcaaggagacactgcctctgctgctgcagcatctctggcaagtgaacagagggaatatggttgcacaatccagtgacgttattgctgtctgtcagagcctcagacagatggcagaaaaatgtcagcaggaccctgagagttgctggtatttccaccagacagctataccttgcctgcttgccttggctgtgcaggcctctatgccagagaaggagccctcagttctgagaaaagtactattggaggatgaggtgttggctgccatggtgtctgtcattggcactgctacaacccacctgagccctgagttagctgcccagagtgtgacacacattgtgcccctcttcttggatggcaacgtgtcctttctgcctgaaaacagcttcccgagcagattccagccattccaggatggctcctcagggcagaggcggctgattgcactgcttatggcctttgtctgctccctgcctcgaaatgtggaaatccctcagctgaaccaactcatgcgggagtttttggaactgagctgctgccacagctgccccttttcttccaccgctgctgccaagtgctttgcaggactcctcaacaagcaccctgcagggcagcagctggatgaattcctacagctagctgtggacaaagtggaggctggcctgggctctgggccttgtcgtagtcaggccttcactcttcttctctgggtaacaaaggccctagtgctcagataccatcctctcagctcctgccttacagcccggctcatgggcctcctgagtgacccagaattaggtccagcagcagctgatggcttctctctgctcatgtctgactgcactgatgtgctgactcgtgctggccatgccgaagtgcggatcatgttccgccagcggttcttcacagataatgtgcctgctttggtccagggcttccatgctgctccccaagatgtgaagccaaactacttgaagggtctttctcatgtacttaacaggctgcccaagcctgtactcttgccagagctgcccacgcttctttccttgctgctggaggccctgtcctgccctgactgtgtggtgcagctctccaccctcagctgccttcagcctcttctactggaagcaccccaagtcatgagtcttcacgtggacaccctcgtcaccaagtttctgaacctcagctctagcccttccatggctgtccggatcgccgcactgcagtgcatgcatgctctcactcgcctgcccacccctgtgctgctgccgtacaaaccacaggtgattcgggccttagccaaacccctggatgacaagaagagactggtgcgcaaggaagcagtgtcagccagaggggagtggtttctgttggggagccctggcagctgagccctcagtcctggcctagactgttctgacaatctaacctgggattactaactgttgagccatcttccccaaagcagggaaaccactggtctctgactgcctttcccacagacacagcacaaatgctaggcctctgttgcatggctgtacaaagaacataagagtccatatttctagtggatttgtaaaataagtgtgtgtgagacacttgcgtttgaagaaagatctagggtcctgggtctcttgcatttatatgtcagaaaaggggcgatatgctgctgaggggtgagtgcatatgagtgtggccctgaggaccagggctggcagatgttgtctacctgctgaagaataaagatttcttttggtaaaaaaaaaaaaaaaaaaaaa

SEQ ID NO: 11 - DNA, 1700 bp, Homo sapiens
ggcggcggcagcgggttcggttgcgcgtggcgcacggggtgggagcggagcccaggccgggagcaggcgccgccgccagcgaccatggggaacgtgttggctgccagctcgccgcccgcagggccgccaccgccgcctgcgccggccctcgtggggctgccgccacctccgccctcgccgccgggcttcacgctgccgccgctgggaggcagcctgggcgccggcaccagtacgagtcgaagttcggaacggacccccggggctgcaaccgccagcgcctcaggggccgccgaggatggggcctgcggctgcctgcccaacccgggcacattcgaggagtgccaccggaagtgcaaggagctgtttcccattcagatggagggtgtcaagctcacagtcaacaaagggttgagtaaccattttcaggtcaaccacacagtagccctcagcacaatcggggagtccaactaccacttcggggtcacatatgtggggacaaagcagctgagtcccacagaggcgttccctgtactggtgggtgacatggacaacagtggcagtctcaacgctcaggtcattcaccagctgggccccggtctcaggtccaagatggccatccagacccagcagtcgaagtttgtgaactggcaggtggacggggagtatcggggctctgacttcacagcagccgtcaccctggggaacccagacgtcctcgtgggttcaggaatcctcgtagcccactacctccagagcatcacgccttgcctggccctgggtggagagctggtctaccaccggcggcctggagaggagggcactgtcatgtctctagctgggaaatacacattgaacaactggttggcaacggtaacgttgggccaggcgggcatgcacgcaacatactaccacaaagccagtgaccagctgcaggtgggtgtggagtttgaggccagcacaaggatgcaggacaccagcgtctccttcgggtaccagctggacctgcccaaggccaacctcctcttcaaaggctctgtggatagcaactggatcgtgggtgccacgctggagaagaagctcccacccctgcccctgacactggcccttggggccttcctgaatcaccgcaagaacaagtttcagtgtggctttggcctcaccatcggctgagccctcctggcccccgccttccacgcccttccgattccacctccacctccacctccccctgccacagaggggagacctgagcccccctcccttccctccccccttgggggtcggggggggacattggaaaggagggaccccgccaccccagcagctgaggaggggattctggaactgaatggcgcttcgggattctgagtagcaggggcagcatgcccagtgggcctggggtcccgggagggattccggaattgaggggcacgcaggattctgagcaccaggggcagaggcggccagacaacctcagggaggagtgtcctggcgtccccatcctccaaagggcctgggcccgccccgagggggcagcgagaggagcttccccatccccggtcagtccaccctgccccgtccactttcccatctcctcggtataaatcatgtttataagttatggaagaaccgggacattttacagaaaaaaaacaaaaaacaacaaaaaatatacgtgggaaaaaaaaaaaaaaaaaaaa

SEQ ID NO: 12 - DNA, 2259 bp, Homo sapiens
gttctccccttcccggctttcggtccggaggaggcgggagcagcttccctgttctgatcctatcgcgggcggcgcagggccggcttggccttccgtgggacggggaggggggcgggatgtgtcacccaaataccagtggggacggtcggtggtggaaccagccgggcaggtcgggtagagtataagagccggagggagcggccgggcggcagacgcctgcagaccatcccagacgccggagcccgagccccgccgagtccccgcgcctcatccgcccgcgtccggtccgcgttcctccgccccaccatggctcggggccccggcctcgcgccgccaccgctgcggctgccgctgctgctgctggtgctggcggcggtgaccggccacacggccgcgcaggacaactgcacgtgtcccaccaacaagatgaccgtgtgcagccccgacggccccggcggccgctgccagtgccgcgcgctgggctcgggcatggcggtcgactgctccacgctgacctccaagtgtctgctgctcaaggcgcgcatgagcgcccccaagaacgcccgcacgctggtgcggccgagtgagcacgcgctcgtggacaacgatggcctctacgaccccgactgcgaccccgagggccgcttcaaggcgcgccagtgcaaccagacgtcggtgtgctggtgcgtgaactcggtgggcgtgcgccgcacggacaagggcgacctgagcctacgctgcgatgacctggtgcgcacccaccacatcctcattgacctgcgccaccgccccaccgccggcgccttcaaccactcagacctggacgccgagctgaggcggctcttccgcgagcgctatcggctgcaccccaagttcgtggcggccgtgcactacgagcagcccaccatccagatcgagctgcggcagaacacgtctcagaaggccgccggtgaagtggatatcggcgatgccgcctactacttcgagagggacatcaagggcgagtctctattccagggccgcggcggcctggacttgcgcgtgcgcggagaacccctgcaggtggagcgcacgctcatctattacctggacgagattcccccgaagttctccatgaagcgcctcaccgccggcctcatcgccgtcatcgtggtggtcgtggtggccctcgtcgccggcatggccgtcctggtgatcaccaaccggagaaagtcggggaagtacaagaaggtggagatcaaggaactgggggagttgagaaaggaaccgagcttgtaggtacccggcggggcaggggatggggtggggtaccggatttcggtatcgtcccagacccaagtgagtcacgcttcctgattcctcggcgcaaaggagacgtttatcctttcaaattcctgccttccccctcccttttgcgcacacaccaggtttaatagatcctggcctcagggtctcctttctttctcacttctgtcttgaaggaagcatttctaaaatgtatcccctttcggtccaacaacaggaaacctgactggggcagtgaaggaagggatggcacagcgttatgtgtaaaaaacaagtatctgtatgacaacccgggatcgtttgcaagtaactgaatccattgcgacattgtgaaggcttaaatgagtttagatgggaaatagcgttgttatcgccttgggtttaaattatttgatgagttccacttgtatcatggcctacccgaggagaagaggagtttgttaactgggcctatgtagtagcctcatttaccatcgtttgtattactgaccacatatgcttgtcactgggaaagaagcctgtttcagctgcctgaacgcagtttggatgtctttgaggacagacattgcccggaaactcagtctatttattcttcagcttgcccttactaccactgatattggtaatgttcttttttgtaaaatgtttgtacatatgttgtctttgataatgttgctgtaattttttaaaataaaacacgaatttaataaaatatgggaaaggcacaaaccagaagttggcatttgtgaaaagtccctccagatttctatcactttggtctctaatttcccaagacttgtattttttttttatttcaaattataacacttttttttcccccagaagtgggtgtttcatgttgctactctggtgtgtcccaagatatcctaactggccagtgtaaatgctattctttctaaataagattatttggaaacttccttcaaactgcag

SEQ ID NO: 13 - DNA, 14135 bp, Homo sapiens
gcactgcagcgccagcgtccgagcgggcggccgagctcccggagcggcctggccccgagccccgagcgggcgtcgctcagcagcaggtcgcggccgcagccccatccagccccgcgcccgccatgccgtccgcgggccccgcctgagctgcggcctccgcgcgcgggcgggcctggggacggcggggccatgcgcgcgctgccctaacgatgccgcccgccgcgcccgcccgcctggcgctggccctgggcctgggcctgtggctcggggcgctggcggggggccccgggcgcggctgcgggccctgcgagcccccctgcctctgcggcccagcgcccggcgccgcctgccgcgtcaactgctcgggccgcgggctgcggacgctcggtcccgcgctgcgcatccccgcggacgccacagcgctagacgtctcccacaacctgctccgggcgctggacgttgggctcctggcgaacctctcggcgctggcagagctggatataagcaacaacaagatttctacgttagaagaaggaatatttgctaatttatttaatttaagtgaaataaacctgagtgggaacccgtttgagtgtgactgtggcctggcgtggctgccgcgatgggcggaggagcagcaggtgcgggtggtgcagcccgaggcagccacgtgtgctgggcctggctccctggctggccagcctctgcttggcatccccttgctggacagtggctgtggtgaggagtatgtcgcctgcctccctgacaacagctcaggcaccgtggcagcagtgtccttttcagctgcccacgaaggcctgcttcagccagaggcctgcagcgccttctgcttctccaccggccagggcctcgcagccctctcggagcagggctggtgcctgtgtggggcggcccagccctccagtgcctcctttgcctgcctgtccctctgctccggccccccgccacctcctgcccccacctgtaggggccccaccctcctccagcacgtcttccctgcctccccaggggccaccctggtggggccccacggacctctggcctctggccagctagcagccttccacatcgctgccccgctccctgtcactgccacacgctgggacttcggagacggctccgccgaggtggatgccgctgggccggctgcctcgcatcgctatgtgctgcctgggcgctatcacgtgacggccgtgctggccctgggggccggctcagccctgctggggacagacgtgcaggtggaagcggcacctgccgccctggagctcgtgtgcccgtcctcggtgcagagtgacgagagcctcgacctcagcatccagaaccgcggtggttcaggcctggaggccgcctacagcatcgtggccctgggcgaggagccggcccgagcggtgcacccgctctgcccctcggacacggagatcttccctggcaacgggcactgctaccgcctggtggtggagaaggcggcctggctgcaggcgcaggagcagtgtcaggcctgggccggggccgccctggcaatggtggacagtcccgccgtgcagcgcttcctggtctcccgggtcaccaggtgcctagacgtgtggatcggcttctcgactgtgcagggggtggaggtgggcccagcgccgcagggcgaggccttcagcctggagagctgccagaactggctgcccggggagccacacccagccacagccgagcactgcgtccggctcgggcccaccgggtggtgtaacaccgacctgtgctcagcgccgcacagctacgtctgcgagctgcagcccggaggcccagtgcaggatgccgagaacctcctcgtgggagcgcccagtggggacctgcagggacccctgacgcctctggcacagcaggacggcctctcagccccgcacgagcccgtggaggtcatggtattcccgggcctgcgtctgagccgtgaagccttcctcaccacggccgaatttgggacccaggagctccggcggcccgcccagctgcggctgcaggtgtaccggctcctcagcacagcagggaccccggagaacggcagcgagcctgagagcaggtccccggacaacaggacccagctggcccccgcgtgcatgccagggggacgctggtgccctggagccaacatctgcttgccgctggacgcctcctgccacccccaggcctgcgccaatggctgcacgtcagggccagggctacccggggccccctatgcgctatggagagagttcctcttctccgttcccgcggggccccccgcgcagtactcggtcaccctccacggccaggatgtcctcatgctccctggtgacctcgttggcttgcagcacgacgctggccctggcgccctcctgcactgctcgccggctcccggccaccctggtccccgggccccgtacctctccgccaacgcctcgtcatggctgccccacttgccagcccagctggagggcacttgggcctgccctgcctgtgccctgcggctgcttgcagccacggaacagctcaccgtgctgctgggcttgaggcccaaccctggactgcggctgcctgggcgctatgaggtccgggcagaggtgggcaatggcgtgtccaggcacaacctctcctgcagctttgacgtggtctccccagtggctgggctgcgggtcatctaccctgccccccgcgacggccgcctctacgtgcccaccaacggctcagccttggtgctccaggtggactctggtgccaacgccacggccacggctcgctggcctgggggcagtgtcagcgcccgctttgagaatgtctgccctgccctggtggccaccttcgtgcccggctgcccctgggagaccaacgataccctgttctcagtggtagcactgccgtggctcagtgagggggagcacgtggtggacgtggtggtggaaaacagcgccagccgggccaacctcagcctgcgggtgacggcggaggagcccatctgtggcctccgcgccacgcccagccccgaggcccgtgtactgcagggagtcctagtgaggtacagccccgtggtggaggccggctcggacatggtcttccggtggaccatcaacgacaagcagtccctgaccttccagaacgtggtcttcaatgtcatttatcagagcgcggcggtcttcaagctctcactgacggcctccaaccacgtgagcaacgtcaccgtgaactacaacgtaaccgtggagcggatgaacaggatgcagggtctgcaggtctccacagtgccggccgtgctgtcccccaatgccacgctagcactgacggcgggcgtgctggtggactcggccgtggaggtggccttcctgtggacctttggggatggggagcaggccctccaccagttccagcctccgtacaacgagtccttcccggttccagacccctcggtggcccaggtgctggtggagcacaatgtcatgcacacctacgctgccccaggtgagtacctcctgaccgtgctggcatctaatgccttcgagaacctgacgcagcaggtgcctgtgagcgtgcgcgcctccctgccctccgtggctgtgggtgtgagtgacggcgtcctggtggccggccggcccgtcaccttctacccgcacccgctgccctcgcctgggggtgttctttacacgtgggacttcggggacggctcccctgtcctgacccagagccagccggctgccaaccacacctatgcctcgaggggcacctaccacgtgcgcctggaggtcaacaacacggtgagcggtgcggcggcccaggcggatgtgcgcgtctttgaggagctccgcggactcagcgtggacatgagcctggccgtggagcagggcgcccccgtggtggtcagcgccgcggtgcagacgggcgacaacatcacgtggaccttcgacatgggggacggcaccgtgctgtcgggcccggaggcaacagtggagcatgtgtacctgcgggcacagaactgcacagtgaccgtgggtgcggccagccccgccggccacctggcccggagcctgcacgtgctggtcttcgtcctggaggtgctgcgcgttgaacccgccgcctgcatccccacgcagcctgacgcgcggctcacggcctacgtcaccgggaacccggcccactacctcttcgactggaccttcggggatggctcctccaacacgaccgtgcgggggtgcccgacggtgacacacaacttcacgcggagcggcacgttccccctggcgctggtgctgtccagccgcgtgaacagggcgcattacttcaccagcatctgcgtggagccagaggtgggcaacgtcaccctgcagccagagaggcagtttgtgcagctcggggacgaggcctggctggtggcatgtgcctggcccccgttcccctaccgctacacctgggactttggcaccgaggaagccgcccccacccgtgccaggggccctgaggtgacgttcatctaccgagacccaggctcctatcttgtgacagtcaccgcgtccaacaacatctctgctgccaatgactcagccctggtggaggtgcaggagcccgtgctggtcaccagcatcaaggtcaatggctcccttgggctggagctgcagcagccgtacctgttctctgctgtgggccgtgggcgccccgccagctacctgtgggatctgggggacggtgggtggctcgagggtccggaggtcacccacgcttacaacagcacaggtgacttcaccgttagggtggccggctggaatgaggtgagccgcagcgaggcctggctcaatgtgacggtgaagcggcgcgtgcgggggctcgtcgtcaatgcaagccgcacggtggtgcccctgaatgggagcgtgagcttcagcacgtcgctggaggccggcagtgatgtgcgctattcctgggtgctctgtgaccgctgcacgcccatccctgggggtcctaccatctcttacaccttccgctccgtgggcaccttcaatatcatcgtcacggctgagaacgaggtgggctccgcccaggacagcatcttcgtctatgtcctgcagctcatagaggggctgcaggtggtgggcggtggccgctacttccccaccaaccacacggtacagctgcaggccgtggttagggatggcaccaacgtctcctacagctggactgcctggagggacaggggcccggccctggccggcagcggcaaaggcttctcgctcaccgtgctcgaggccggcacctaccatgtgcagctgcgggccaccaacatgctgggcagcgcctgggccgactgcaccatggacttcgtggagcctgtggggtggctgatggtggccgcctccccgaacccagctgccgtcaacacaagcgtcaccctcagtgccgagctggctggtggcagtggtgtcgtatacacttggtccttggaggaggggctgagctgggagacctccgagccatttaccacccatagcttccccacacccggcctgcacttggtcaccatgacggcagggaacccgctgggctcagccaacgccaccgtggaagtggatgtgcaggtgcctgtgagtggcctcagcatcagggccagcgagcccggaggcagcttcgtggcggccgggtcctctgtgcccttttgggggcagctggccacgggcaccaatgtgagctggtgctgggctgtgcccggcggcagcagcaagcgtggccctcatgtcaccatggtcttcccggatgctggcaccttctccatccggctcaatgcctccaacgcagtcagctgggtctcagccacgtacaacctcacggcggaggagcccatcgtgggcctggtgctgtgggccagcagcaaggtggtggcgcccgggcagctggtccattttcagatcctgctggctgccggctcagctgtcaccttccgcctgcaggtcggcggggccaaccccgaggtgctccccgggccccgtttctcccacagcttcccccgcgtcggagaccacgtggtgagcgtgcggggcaaaaaccacgtgagctgggcccaggcgcaggtgcgcatcgtggtgctggaggccgtgagtgggctgcaggtgcccaactgctgcgagcctggcatcgccacgggcactgagaggaacttcacagcccgcgtgcagcgcggctctcgggtcgcctacgcctggtacttctcgctgcagaaggtccagggcgactcgctggtcatcctgtcgggccgcgacgtcacctacacgcccgtggccgcggggctgttggagatccaggtgcgcgccttcaacgccctgggcagtgagaaccgcacgctggtgctggaggttcaggacgccgtccagtatgtggccctgcagagcggcccctgcttcaccaaccgctcggcgcagtttgaggccgccaccagccccagcccccggcgtgtggcctaccactgggactttggggatgggtcgccagggcaggacacagatgagcccagggccgagcactcctacctgaggcctggggactaccgcgtgcaggtgaacgcctccaacctggtgagcttcttcgtggcgcaggccacggtgaccgtccaggtgctggcctgccgggagccggaggtggacgtggtcctgcccctgcaggtgctgatgcggcgatcacagcgcaactacttggaggcccacgttgacctgcgcgactgcgtcacctaccagactgagtaccgctgggaggtgtatcgcaccgccagctgccagcggccggggcgcccagcgcgtgtggccctgcccggcgtggacgtgagccggcctcggctggtgctgccgcggctggcgctgcctgtggggcactactgctttgtgtttgtcgtgtcatttggggacacgccactgacacagagcatccaggccaatgtgacggtggcccccgagcgcctggtgcccatcattgagggtggctcataccgcgtgtggtcagacacacgggacctggtgctggatgggagcgagtcctacgaccccaacctggaggacggcgaccagacgccgctcagtttccactgggcctgtgtggcttcgacacagagggaggctggcgggtgtgcgctgaactttgggccccgcgggagcagcacggtcaccattccacgggagcggctggcggctggcgtggagtacaccttcagcctgaccgtgtggaaggccggccgcaaggaggaggccaccaaccagacggtgctgatccggagtggccgggtgcccattgtgtccttggagtgtgtgtcctgcaaggcacaggccgtgtacgaagtgagccgcagctcctacgtgtacttggagggccgctgcctcaattgcagcagcggctccaagcgagggcggtgggctgcacgtacgttcagcaacaagacgctggtgctggatgagaccaccacatccacgggcagtgcaggcatgcgactggtgctgcggcggggcgtgctgcgggacggcgagggatacaccttcacgctcacggtgctgggccgctctggcgaggaggagggctgcgcctccatccgcctgtcccccaaccgcccgccgctggggggctcttgccgcctcttcccactgggcgctgtgcacgccctcaccaccaaggtgcacttcgaatgcacgggctggcatgacgcggaggatgctggcgccccgctggtgtacgccctgctgctgcggcgctgtcgccagggccactgcgaggagttctgtgtctacaagggcagcctctccagctacggagccgtgctgcccccgggtttcaggccacacttcgaggtgggcctggccgtggtggtgcaggaccagctgggagccgctgtggtcgccctcaacaggtctttggccatcaccctcccagagcccaacggcagcgcaacggggctcacagtctggctgcacgggctcaccgctagtgtgctcccagggctgctgcggcaggccgatccccagcacgtcatcgagtactcgttggccctggtcaccgtgctgaacgagtacgagcgggccctggacgtggcggcagagcccaagcacgagcggcagcaccgagcccagatacgcaagaacatcacggagactctggtgtccctgagggtccacactgtggatgacatccagcagatcgctgctgcgctggcccagtgcatggggcccagcagggagctcgtatgccgctcgtgcctgaagcagacgctgcacaagctggaggccatgatgctcatcctgcaggcagagaccaccgcgggcaccgtgacgcccaccgccatcggagacagcatcctcaacatcacaggagacctcatccacctggccagctcggacgtgcgggcaccacagccctcagagctgggagccgagtcaccatctcggatggtggcgtcccaggcctacaacctgacctctgccctcatgcgcatcctcatgcgctcccgcgtgctcaacgaggagcccctgacgctggcgggcgaggagatcgtggcccagggcaagcgctcggacccgcggagcctgctgtgctatggcggcgccccagggcctggctgccacttctccatccccgaggctttcagcggggccctggccaacctcagtgacgtggtgcagctcatctttctggtggactccaatccctttccctttggctatatcagcaactacaccgtctccaccaaggtggcctcgatggcattccagacacaggccggcgcccagatccccatcgagcggctggcctcagagcgcgccatcaccgtgaaggtgcccaacaactcggactgggctgcccggggccaccgcagctccgccaactccgccaactccgttgtggtccagccccaggcctccgtcggtgctgtggtcaccctggacagcagcaaccctgcggccgggctgcatctgcagctcaactatacgctgctggacggccactacctgtctgaggaacctgagccctacctggcagtctacctacactcggagccccggcccaatgagcacaactgctcggctagcaggaggatccgcccagagtcactccagggtgctgaccaccggccctacaccttcttcatttccccggggagcagagacccagcggggagttaccatctgaacctctccagccacttccgctggtcggcgctgcaggtgtccgtgggcctgtacacgtccctgtgccagtacttcagcgaggaggacatggtgtggcggacagaggggctgctgcccctggaggagacctcgccccgccaggccgtctgcctcacccgccacctcaccgccttcggcgccagcctcttcgtgcccccaagccatgtccgctttgtgtttcctgagccgacagcggatgtaaactacatcgtcatgctgacatgtgctgtgtgcctggtgacctacatggtcatggccgccatcctgcacaagctggaccagttggatgccagccggggccgcgccatccctttctgtgggcagcggggccgcttcaagtacgagatcctcgtcaagacaggctggggccggggctcaggtaccacggcccacgtgggcatcatgctgtatggggtggacagccggagcggccaccggcacctggacggcgacagagccttccaccgcaacagcctggacatcttccggatcgccaccccgcacagcctgggtagcgtgtggaagatccgagtgtggcacgacaacaaagggctcagccctgcctggttcctgcagcacgtcatcgtcagggacctgcagacggcacgcagcgccttcttcctggtcaatgactggctttcggtggagacggaggccaacgggggcctggtggagaaggaggtgctggccgcgagcgacgcagcccttttgcgcttccggcgcctgctggtggctgagctgcagcgtggcttctttgacaagcacatctggctctccatatgggaccggccgcctcgtagccgtttcactcgcatccagagggccacctgctgcgttctcctcatctgcctcttcctgggcgccaacgccgtgtggtacggggctgttggcgactctgcctacagcacggggcatgtgtccaggctgagcccgctgagcgtcgacacagtcgctgttggcctggtgtccagcgtggttgtctatcccgtctacctggccatcctttttctcttccggatgtcccggagcaaggtggctgggagcccgagccccacacctgccgggcagcaggtgctggacatcgacagctgcctggactcgtccgtgctggacagctccttcctcacgttctcaggcctccacgctgaggcctttgttggacagatgaagagtgacttgtttctggatgattctaagagtctggtgtgctggccctccggcgagggaacgctcagttggccggacctgctcagtgacccgtccattgtgggtagcaatctgcggcagctggcacggggccaggcgggccatgggctgggcccagaggaggacggcttctccctggccagcccctactcgcctgccaaatccttctcagcatcagatgaagacctgatccagcaggtccttgccgagggggtcagcagcccagcccctacccaagacacccacatggaaacggacctgctcagcagcctgtccagcactcctggggagaagacagagacgctggcgctgcagaggctgggggagctggggccacccagcccaggcctgaactgggaacagccccaggcagcgaggctgtccaggacaggactggtggagggtctgcggaagcgcctgctgccggcctggtgtgcctccctggcccacgggctcagcctgctcctggtggctgtggctgtggctgtctcagggtgggtgggtgcgagcttccccccgggcgtgagtgttgcgtggctcctgtccagcagcgccagcttcctggcctcattcctcggctgggagccactgaaggtcttgctggaagccctgtacttctcactggtggccaagcggctgcacccggatgaagatgacaccctggtagagagcccggctgtgacgcctgtgagcgcacgtgtgccccgcgtacggccaccccacggctttgcactcttcctggccaaggaagaagcccgcaaggtcaagaggctacatggcatgctgcggagcctcctggtgtacatgctttttctgctggtgaccctgctggccagctatggggatgcctcatgccatgggcacgcctaccgtctgcaaagcgccatcaagcaggagctgcacagccgggccttcctggccatcacgcggtctgaggagctctggccatggatggcccacgtgctgctgccctacgtccacgggaaccagtccagcccagagctggggcccccacggctgcggcaggtgcggctgcaggaagcactctacccagaccctcccggccccagggtccacacgtgctcggccgcaggaggcttcagcaccagcgattacgacgttggctgggagagtcctcacaatggctcggggacgtgggcctattcagcgccggatctgctgggggcatggtcctggggctcctgtgccgtgtatgacagcgggggctacgtgcaggagctgggcctgagcctggaggagagccgcgaccggctgcgcttcctgcagctgcacaactggctggacaacaggagccgcgctgtgttcctggagctcacgcgctacagcccggccgtggggctgcacgccgccgtcacgctgcgcctcgagttcccggcggccggccgcgccctggccgccctcagcgtccgcccctttgcgctgcgccgcctcagcgcgggcctctcgctgcctctgctcacctcggtgtgcctgctgctgttcgccgtgcacttcgccgtggccgaggcccgtacttggcacagggaagggcgctggcgcgtgctgcggctcggagcctgggcgcggtggctgctggtggcgctgacggcggccacggcactggtacgcctcgcccagctgggtgccgctgaccgccagtggacccgtttcgtgcgcggccgcccgcgccgcttcactagcttcgaccaggtggcgcagctgagctccgcagcccgtggcctggcggcctcgctgctcttcctgcttttggtcaaggctgcccagcagctacgcttcgtgcgccagtggtccgtctttggcaagacattatgccgagctctgccagagctcctgggggtcaccttgggcctggtggtgctcggggtagcctacgcccagctggccatcctgctcgtgtcttcctgtgtggactccctctggagcgtggcccaggccctgttggtgctgtgccctgggactgggctctctaccctgtgtcctgccgagtcctggcacctgtcacccctgctgtgtgtggggctctgggcactgcggctgtggggcgccctacggctgggggctgttattctccgctggcgctaccacgccttgcgtggagagctgtaccggccggcctgggagccccaggactacgagatggtggagttgttcctgcgcaggctgcgcctctggatgggcctcagcaaggtcaaggagttccgccacaaagtccgctttgaagggatggagccgctgccctctcgctcctccaggggctccaaggtatccccggatgtgcccccacccagcgctggctccgatgcctcgcacccctccacctcctccagccagctggatgggctgagcgtgagcctgggccggctggggacaaggtgtgagcctgagccctcccgcctccaagccgtgttcgaggccctgctcacccagtttgaccgactcaaccaggccacagaggacgtctaccagctggagcagcagctgcacagcctgcaaggccgcaggagcagccgggcgcccgccggatcttcccgtggcccatccccgggcctgcggccagcactgcccagccgccttgcccgggccagtcggggtgtggacctggccactggccccagcaggacaccccttcgggccaagaacaaggtccaccccagcagcacttagtcctccttcctggcgggggtgggccgtggagtcggagtggacaccgctcagtattactttctgccgctgtcaaggccgagggccaggcagaatggctgcacgtaggttccccagagagcaggcaggggcatctgtctgtctgtgggcttcagcactttaaagaggctgtgtggccaaccaggacccagggtcccctccccagctcccttgggaaggacacagcagtattggacggtttctagcctctgagatgctaatttatttccccgagtcctcaggtacagcgggctgtgcccggccccaccccctgggcagatgtcccccactgctaaggctgctggcttcagggagggttagcctgcaccgccgccaccctgcccctaagttattacctctccagttcctaccgtactccctgcaccgtctcactgtgtgtctcgtgtcagtaatttatatggtgttaaaatgtgtatatttttgtatgtcactattttcactagggctgaggggcctgcgcccagagctggcctcccccaacacctgctgcgcttggtaggtgtggtggcgttatggcagcccggctgctgcttggatgcgagcttggccttgggccggtgctgggggcacagctgtctgccaggcactctcatcaccccagaggccttgtcatcctcccttgccccaggccaggtagcaagagagcagcgcccaggcctgctggcatcaggtctgggcaagtagcaggactaggcatgtcagaggaccccagggtggttagaggaaaagactcctcctgggggctggctcccagggtggaggaaggtgactgtgtgtgtgtgtgtgtgcgcgcgcgcacgcgcgagtgtgctgtatggcccaggcagcctcaaggccctcggagctggctgtgcctgcttctgtgtaccacttctgtgggcatggccgcttctagagcctcgacacccccccaacccccgcaccaagcagacaaagtcaataaaagagctgtctgactgc

SEQ ID NO: 14 - DNA, 2699 bp, Homo sapiens
ggagcgcttaagaggagggtcgggctcggccggggagtcccagtggcggaggctacgaaacttgggggagtgcacagaagaacttcgggagcgcacgcgggaccagggaccaggctgagactcggggcgccagtccgggcaggggcagcgggagccggccgggtagggtgcagcctgaggcttgttcagcagaacaggtgcaagccacattgttgccaagacctgcctgaagccggattctccccactgcctccttcaaccccgcctcttcctcctcctgtgggactgctcccccctcctgtgaggctagatagatgccctgtatccaagcccaatatgggacaccagcaccgagtccgggaccccgtgaccacctggcaagcgaccccctgacccctgagttcatcaagcccaccatggacctggccagccccgaggcagcccccgctgcccccactgccctgcccagcttcagcaccttcatggacggctacacaggagagtttgacaccttcctctaccagctgccaggaacagtccagccatgctcctcagcctcctcctcggcctcctccacatcctcgtcctcagccacctcccctgcctctgcctccttcaagttcgaggacttccaggtgtacggctgctaccccggccccctgagcggcccagtggatgaggccctgtcctccagtggctctgactactatggcagcccctgctcggccccgtcgccctccacgcccagcttccagccgccccagctctctccctgggatggctccttcggccacttctcgcccagccagacttacgaaggcctgcgggcatggacagagcagctgcccaaagcctctgggcccccacagcctccagccttcttttccttcagtcctcccaccggccccagccccagcctggcccagagccccctgaagttgttcccctcacaggccacccaccagctgggggagggagagagctattccatgcctacggccttcccaggtttggcacccacttctccacaccttgagggctcggggatactggatacacccgtgacctcaaccaaggcccggagcggggccccaggtggaagtgaaggccgctgtgctgtgtgtggggacaacgcttcatgccagcattatggtgtccgcacatgtgagggctgcaagggcttcttcaagcgcacagtgcagaaaaacgccaagtacatctgcctggctaacaaggactgccctgtggacaagaggcggcgaaaccgctgccagttctgccgcttccagaagtgcctggcggtgggcatggtgaaggaagttgtccgaacagacagcctgaaggggcggcggggccggctaccttcaaaacccaagcagcccccagatgcctcccctgccaatctcctcacttccctggtccgtgcacacctggactcagggcccagcactgccaaactggactactccaagttccaggagctggtgctgccccactttgggaaggaagatgctggggatgtacagcagttctacgacctgctctccggttctctggaggtcatccgcaagtgggcggagaagatccctggctttgctgagctgtcaccggctgaccaggacctgttgctggagtcggccttcctggagctcttcatcctccgcctggcgtacaggtctaagccaggcgagggcaagctcatcttctgctcaggcctggtgctacaccggctgcagtgtgcccgtggcttcggggactggattgacagtatcctggccttctcaaggtccctgcacagcttgcttgtcgatgtccctgccttcgcctgcctctctgcccttgtcctcatcaccgaccggcatgggctgcaggagccgcggcgggtggaggagctgcagaaccgcatcgccagctgcctgaaggagcacgtggcagctgtggcgggcgagccccagccagccagctgcctgtcacgtctgttgggcaaactgcccgagctgcggaccctgtgcacccagggcctgcagcgcatcttctacctcaagctggaggacttggtgccccctccacccatcattgacaagatcttcatggacacgctgcccttctgacccctgcctgggaacacgtgtgcacatgcgcactctcatatgccaccccatgtgcctttagtccacggacccccagagcacccccaagcctgggcttgagctgcagaatgactccaccttctcacctgctccaggaggtttgcagggagctcaagcccttggggagggggatgccttcatgggggtgaccccacgatttgtcttatcccccccagcctggccccggcctttatgttttttgtaagataaaccgtttttaacacatagcgccgtgctgtaaataagcccagtgctgctgtaaatacaggaagaaagagcttgaggtgggagcggggctgggaggaagggatgggccccgccttcctgggcagcctttccagcctcctgctggctctctcttcctaccctccttccacatgtacataaactgtcactctaggaagaagacaaatgacagattctgacatttatatttgtgtattttcctggatttatagtatgtgacttttctgattaatatatttaatatattgaataaaaaatagacatgtagttggaaaaaaaaaaaaaaaaaaaaaaaaaaaaaaa

SEQ ID NO: 15 - DNA, 5511 bp, Homo sapiens
acacacacacacccctcccctgccatccctccccggactccggctccggctccgattgcaatttgcaacctccgctgccgtcgccgcagcagccaccaattcgccagcggttcaggtggctcttgcctcgatgtcctagcctaggggcccccgggccggacttggctgggctcccttcaccctctgcggagtcatgagggcgaacgacgctctgcaggtgctgggcttgcttttcagcctggcccggggctccgaggtgggcaactctcaggcagtgtgtcctgggactctgaatggcctgagtgtgaccggcgatgctgagaaccaataccagacactgtacaagctctacgagaggtgtgaggtggtgatggggaaccttgagattgtgctcacgggacacaatgccgacctctccttcctgcagtggattcgagaagtgacaggctatgtcctcgtggccatgaatgaattctctactctaccattgcccaacctccgcgtggtgcgagggacccaggtctacgatgggaagtttgccatcttcgtcatgttgaactataacaccaactccagccacgctctgcgccagctccgcttgactcagctcaccgagattctgtcagggggtgtttatattgagaagaacgataagctttgtcacatggacacaattgactggagggacatcgtgagggaccgagatgctgagatagtggtgaaggacaatggcagaagctgtcccccctgtcatgaggtttgcaaggggcgatgctggggtcctggatcagaagactgccagacattgaccaagaccatctgtgctcctcagtgtaatggtcactgctttgggcccaaccccaaccagtgctgccatgatgagtgtgccgggggctgctcaggccctcaggacacagactgctttgcctgccggcacttcaatgacagtggagcctgtgtacctcgctgtccacagcctcttgtctacaacaagctaactttccagctggaacccaatccccacaccaagtatcagtatggaggagtttgtgtagccagctgtccccataactttgtggtggatcaaacatcctgtgtcagggcctgtcctcctgacaagatggaagtagataaaaatgggctcaagatgtgtgagccttgtgggggactatgtcccaaagcctgtgagggaacaggctctgggagccgcttccagactgtggactcgagcaacattgatggatttgtgaactgcaccaagatcctgggcaacctggactttctgatcaccggcctcaatggagacccctggcacaagatccctgccctggacccagagaagctcaatgtcttccggacagtacgggagatcacaggttacctgaacatccagtcctggccgccccacatgcacaacttcagtgttttttccaatttgacaaccattggaggcagaagcctctacaaccggggcttctcattgttgatcatgaagaacttgaatgtcacatctctgggcttccgatccctgaaggaaattagtgctgggcgtatctatataagtgccaataggcagctctgctaccaccactctttgaactggaccaaggtgcttcgggggcctacggaagagcgactagacatcaagcataatcggccgcgcagagactgcgtggcagagggcaaagtgtgtgacccactgtgctcctctgggggatgctggggcccaggccctggtcagtgcttgtcctgtcgaaattatagccgaggaggtgtctgtgtgacccactgcaactttctgaatggggagcctcgagaatttgcccatgaggccgaatgcttctcctgccacccggaatgccaacccatggagggcactgccacatgcaatggctcgggctctgatacttgtgctcaatgtgcccattttcgagatgggccccactgtgtgagcagctgcccccatggagtcctaggtgccaagggcccaatctacaagtacccagatgttcagaatgaatgtcggccctgccatgagaactgcacccaggggtgtaaaggaccagagcttcaagactgtttaggacaaacactggtgctgatcggcaaaacccatctgacaatggctttgacagtgatagcaggattggtagtgattttcatgatgctgggcggcacttttctctactggcgtgggcgccggattcagaataaaagggctatgaggcgatacttggaacggggtgagagcatagagcctctggaccccagtgagaaggctaacaaagtcttggccagaatcttcaaagagacagagctaaggaagcttaaagtgcttggctcgggtgtctttggaactgtgcacaaaggagtgtggatccctgagggtgaatcaatcaagattccagtctgcattaaagtcattgaggacaagagtggacggcagagttttcaagctgtgacagatcatatgctggccattggcagcctggaccatgcccacattgtaaggctgctgggactatgcccagggtcatctctgcagcttgtcactcaatatttgcctctgggttctctgctggatcatgtgagacaacaccggggggcactggggccacagctgctgctcaactggggagtacaaattgccaagggaatgtactaccttgaggaacatggtatggtgcatagaaacctggctgcccgaaacgtgctactcaagtcacccagtcaggttcaggtggcagattttggtgtggctgacctgctgcctcctgatgataagcagctgctatacagtgaggccaagactccaattaagtggatggcccttgagagtatccactttgggaaatacacacaccagagtgatgtctggagctatggtgtgacagtttgggagttgatgaccttcggggcagagccctatgcagggctacgattggctgaagtaccagacctgctagagaagggggagcggttggcacagccccagatctgcacaattgatgtctacatggtgatggtcaagtgttggatgattgatgagaacattcgcccaacctttaaagaactagccaatgagttcaccaggatggcccgagacccaccacggtatctggtcataaagagagagagtgggcctggaatagcccctgggccagagccccatggtctgacaaacaagaagctagaggaagtagagctggagccagaactagacctagacctagacttggaagcagaggaggacaacctggcaaccaccacactgggctccgccctcagcctaccagttggaacacttaatcggccacgtgggagccagagccttttaagtccatcatctggatacatgcccatgaaccagggtaatcttggggagtcttgccaggagtctgcagtttctgggagcagtgaacggtgcccccgtccagtctctctacacccaatgccacggggatgcctggcatcagagtcatcagaggggcatgtaacaggctctgaggctgagctccaggagaaagtgtcaatgtgtaggagccggagcaggagccggagcccacggccacgcggagatagcgcctaccattcccagcgccacagtctgctgactcctgttaccccactctccccacccgggttagaggaagaggatgtcaacggttatgtcatgccagatacacacctcaaaggtactccctcctcccgggaaggcaccctttcttcagtgggtctcagttctgtcctgggtactgaagaagaagatgaagatgaggagtatgaatacatgaaccggaggagaaggcacagtccacctcatccccctaggccaagttcccttgaggagctgggttatgagtacatggatgtggggtcagacctcagtgcctctctgggcagcacacagagttgcccactccaccctgtacccatcatgcccactgcaggcacaactccagatgaagactatgaatatatgaatcggcaacgagatggaggtggtcctgggggtgattatgcagccatgggggcctgcccagcatctgagcaagggtatgaagagatgagagcttttcaggggcctggacatcaggccccccatgtccattatgcccgcctaaaaactctacgtagcttagaggctacagactctgcctttgataaccctgattactggcatagcaggcttttccccaaggctaatgcccagagaacgtaactcctgctccctgtggcactcagggagcatttaatggcagctagtgcctttagagggtaccgtcttctccctattccctctctctcccaggtcccagccccttttccccagtcccagacaattccattcaatctttggaggcttttaaacattttgacacaaaattcttatggtatgtagccagctgtgcactttcttctctttcccaaccccaggaaaggttttccttattttgtgtgctttcccagtcccattcctcagcttcttcacaggcactcctggagatatgaaggattactctccatatcccttcctctcaggctcttgactacttggaactaggctcttatgtgtgcctttgtttcccatcagactgtcaagaagaggaaagggaggaaacctagcagaggaaagtgtaattttggtttatgactcttaaccccctagaaagacagaagcttaaaatctgtgaagaaagaggttaggagtagatattgattactatcataattcagcacttaactatgagccaggcatcatactaaacttcacctacattatctcacttagtcctttatcatccttaaaacaattctgtgacatacatattatctcattttacacaaagggaagtcgggcatggtggctcatgcctgtaatctcagcactttgggaggctgaggcagaaggattacctgaggcaaggagtttgagaccagcttagccaacatagtaagacccccatctctttaaaaaaaaaaaaaaaaaaaaaaaaaaaactttagaactgggtgcagtggctcatgcctgtaatcccagccagcactttgggaggctgagatgggaagatcacttgagcccagaattagagataagcctatggaaacatagcaagacactgtctctacaggggaaaaaaaaaaaagaaactgagccttaaagagatgaaataaattaagcagtagatccaggatgcaaaatcctcccaattcctgtgcatgtgctcttattgtaaggtgccaagaaaaactgatttaagttacagcccttgtttaaggggcactgtttcttgtttttgcactgaatcaagtctaaccccaacagccacatcctcctatacctagacatctcatctcaggaagtggtggtgggggtagtcagaaggaaaaataactggacatctttgtgtaaaccataatccacatgtgccgtaaatgatcttcactccttatccgagggcaaattcacaaggatccccaagatccacttttagaagccattctcatcca

SEQ ID NO: 16 - DNA, 546 bp, Homo sapiens
gatttctcccggaacctctgctcagcctggtgaaccacacaggccagcgctctgacatgcagaaggtgaccctgggcctgcttgtgttcctggcaggctttcctgtcctggacgccaatgacctagaagataaaaacagtcctttctactatgactggcacagcctccaggttggcgggctcatctgcgctggggttctgtgcgccatgggcatcatcatcgtcatgagtgcaaaatgcaaatgcaagtttggccagaagtccggtcaccatccaggggagactccacctctcatcaccccaggctcagcccaaagctgatgaggacagaccagctgaaattgggtggaggaccgttctctgtccccaggtcctgtctctgcacagaaacttgaactccaggatggaattcttcctcctctgctgggactcctttgcatggcagggcctcatctcacctctcgcaagagggtctctttgttcaattttttttaatctaaaatgattgtgcctctccaaaaaaaaaaaaaaaaaaaaaaaaaaaaaa

SEQ ID NO: 17 - DNA, 1938 bp, Homo sapiens
gactttggtggcaagaggagctggcggagcccagccagtgggcggggccaggggaggggcgggcaggtaggtgcagccactcctgggaggaccctgcgtggccagacggtgctggtgactcgtccacactgctcgcttcggatactccaggcgtctcccgttgcggccgctccctgccttagaggccagccttggacacttgctgcccctttccagcccggattctgggatccttccctctgagccaacatctgggtcctgccttcgacaccaccccaaggcttcctaccttgcgtgcctggagtctgccccaggggcccttgtcctgggccatggcccagaagggggtcctggggcctgggcagctgggggctgtggccattctgctctatcttggattactccggtcggggacaggagcggaaggggcagaagctccctgcggtgtggccccccaagcacgcatcacaggtggcagcagtgcagtcgccggtcagtggccctggcaggtcagcatcacctatgaaggcgtccatgtgtgtggtggctctctcgtgtctgagcagtgggtgctgtcagctgctcactgcttccccagcgagcaccacaaggaagcctatgaggtcaagctgggggcccaccagctagactcctactccgaggacgccaaggtcagcaccctgaaggacatcatcccccaccccagctacctccaggagggctcccagggcgacattgcactcctccaactcagcagacccatcaccttctcccgctacatccggcccatctgcctccctgcagccaacgcctccttccccaacggcctccactgcactgtcactggctggggtcatgtggccccctcagtgagcctcctgacgcccaagccactgcagcaactcgaggtgcctctgatcagtcgtgagacgtgtaactgcctgtacaacatcgacgccaagcctgaggagccgcactttgtccaagaggacatggtgtgtgctggctatgtggaggggggcaaggacgcctgccagggtgactctgggggcccactctcctgccctgtggagggtctctggtacctgacgggcattgtgagctggggagatgcctgtggggcccgcaacaggcctggtgtgtacactctggcctccagctatgcctcctggatccaaagcaaggtgacagaactccagcctcgtgtggtgccccaaacccaggagtcccagcccgacagcaacctctgtggcagccacctggccttcagctctgccccagcccagggcttgctgaggcccatccttttcctgcctctgggcctggctctgggcctcctctccccatggctcagcgagcactgagctggccctacttccaggatggatgcatcacactcaaggacaggagcctggtccttccctgatggcctttggacccagggcctgacttgagccactccttccttcaggactctgcgggaggctggggccccatcttgatctttgagcccattcttctgggtgtgctttttgggaccatcactgagagtcaggagttttactgcctgtagcaatggccagagcctctggcccctcacccaccatggaccagcccattggccgagctcctggggagctcctgggacccttggctatgaaaatgagccctggctcccacctgtttctggaagactgctcccggcccgcctgcccagactgatgagcacatctctctgccctctccctgtgttctgggctggggccacctttgtgcagcttcgaggacaggaaaggccccaatcttgcccactggccgctgagcgcccccgagccctgactcctggactccggaggactgagcccccaccggaactgggctggcgcttggatctggggtgggagtaacagggcagaaatgattaaaatgtttgagcac

SEQ ID NO: 18 - DNA, 561 bp, Homo sapiens
  misc_feature (1)..(561): n = a,c,t, or g
agttcattcatttattccagcaacaaatatttgagaacacactgtgtcccagacactgttctaaggactggcagcgaagtccaagacaaacagtccctaccttcagcaagtttgcagtcaagcaggatgcggatgctgagcattacaagggaaatgattattctgagagaggaagtatggggtgctatgggaacatacaaccagggacctaattttatgggaaagggaccagcccagatccaacacttgctctcccagtttacctccagtaggttctttttaacttgaactaatcttgtttggtggggtacacagtgaggaaaaagaagagctagtgacaaaatctaactcccttctcagtcttaagcaaggtgaaggcaagggagtagaagatatcaagggagtgagtggtggtagccaccaaagggagatagcagactgaggncctaaaaaaagaaaggaaatctaaatctatcagcaggncngagaaagaatgcttaaggtgattanatgggatcctggatgncctttcccggattttaaaagaanccnaaccnggga

SEQ ID NO: 19 - DNA, 3891 bp, Homo sapiens
gcgcactctggggaaagcggagctgcaccccgccccgtattgctgctcagctcctcagctgtgcgtgcgagggacgtcgggggtggcgccgcagcagttgcccctggtaacgggggaggcagcaggaggaggaggaggaggagggactcggcgggaggatgggcttgctctcaattttgcgcaagttgaaaagtgcaccagaccaggaggtgagaatacttctcctgggcttggataatgctggcaagaccactcttctgaagcagcttgcatctgaagacatcagccacatcacacctacacagggtttcaacatcaaaagtgtacaatcacaaggttttaaactgaatgtatgggacattggtggacagaggaaaatcagaccatactggaagaattattttgaaaataccgatattcttatatatgtaatcgacagtgcagacagaaaaagatttgaagagacgggtcaggaactagcggaattactggaggaagaaaaactaagttgtgtgccagtgctcatctttgctaataagcaggatttgctcacagcagcccctgcctctgaaattgcagaaggactgaacctgcataccatccgcgaccgagtctggcagatccagtcttgctcagctctcacaggagagggcgttcaggatggcatgaactgggtctgcaaaaatgtcaatgcaaagaagaaataaaatctagacgaatggagatgcaggagctgcgggagccgaattcggtcctgaaaaacactaatttgctgctttctgaccaaatgtttttccatctgtgtacagctccagctgtttgaagagagggaacaacacggtttagaaagaatccccattccagcagtagatttaactgatctctgaggttcagtatcatttttcaaataaaggaattatattatttcctctgcataattgaaatagtattaaatgtctcaaagcacatgattagaaaatgagatcttttaaatgagcaagagattgcattgcagtttagacaattccagtgggcttttttttcctctcaaaaaaaaaaaaagaaaaagaaaaagaggaagaagcagctttgctgagttcatttatttactgacccgtcccttgcattccctccatggttttgaaaccacagacagtgtttgctggtgctgtcagtgatttttaccgtcactagcccagccaggcttcagtctgtccgacaggaagctgctgggtgggggtggggggagaaaaggcagataattaaaccatctcatcgtcttgcaggtcggagactacgtatgtaatcctcactctttggacagaaaaaaaaaaaaaagtctttcttgcagacaagtcactacagaaacataccccatcccacccacccctgcctctgccccagccagccacacagagaagcaaattcttatgacttttgactgtaatgacatctggaatgtaaggagaggtgggaggtttaattccagaaaaattacaaggtccttaaaaagctctcacatcgagggctcaggctagcgtaaacaggctttctccagctcagtggagcagtgagcagccgactctgagattagctggcttctccacggccgtcctatagacaggatttctaaagctcaaagaattctgtgtttaaacgatcacaataggccgctgctatcagattttagaaataaatgcagctttaccatgaacctgctccactgagaaaagccaggcagatcgatttttagatcaatttttacagtgctggcaacttggtggtgtgggatgctcctggatggagagggtttgctgctggggaggacatgggtgtgtgtgtgactgcaggggtcgtgtccaaggaatcaagagtcaccccagctgctgggctcctctgcctctctgcagcagaatgtccgtcctctgttgattgattggagaggaatagcagaacatttctcctgcccctcgttgcaaaacgagcttgtttccctgaacctcagaaatcctcagcttcaaacatggggaaacaggccagagcattgcccggctcctgaattaaactctgttctggtgcctgagctcaggggttttcagagaatgaataagagactgtccagtgactggtgggtccctgggggccagctgccttctcatcctgggaggtggcccttcccaagcccatcagggcgtgtgagcagactgaaggggccgctgcagcccctggccctcaatacccagctgcttctggctaagagtgcagcagagactgaggcatagccagcttcaaaagcgatctgacatgaaagtcattaacaaagccagccgtgaaaaggtgccccagagttgctgtggacagacctgtaaggacttgcaaaacaaaagaaagtgaggggtttttttaacctcagagctagctgctctctgcagcctcctccactggcttctctggctcacccaagctctcccttacagaggcaacacagaattataaggaatcagaaatcccccttctaccaggctgcaaatgtggctctagcacttgcaaattgttttttcttccgaatagttcagcagggacaagttatctgaggggcaaaatgcctgcttggaggtctgcaattttggaacactgcagtatggaactttggcattggagggtctgtaaaatatttttgttcttttaccaccaacttaggggactgttttaaagagccatcccaaggcctctcctagcaggcagaagccactcctctgataacggcctctgtaaatgttctgatttgctctcagctgcagagacacagagacactgcagatgtcacacgctttcatcttccctttgagcccttttgaaccctcctggggctctggggtagatgagagaagcctgaaaaaggcagagtttgaaagctcccatttaaaaacaaaatactttttaaagccctcttgcctcttccctgcccactcctgccccctgaccagaagacagaatttgaagctggaaagggaagaccccttttcccctcctcctgtccccagtgagtcttagcgagacttttgccctgcgcacaattgcatctgaatgtgcgggggagagggctgggggccggagggcaggcaaggcctggggggtgctcgtgatatgtgctcaagccagttgtgggaaaaactcgagtcctcccctcctcccgacctaccccgtgtggctgcttttggctggattccctgcacccagtgcaacacaccctttccccttcactctcccttggttactatggaaacaagggtgtcattgatgtgggctgagctggggaacatgtcggtgcacagctgaaagtcagcgattatgccggcggttagaaatgtgccagggttaaaggagtccgcagctcccacggctgctgggaggacatggtcctgcccccttccttcctccctccctccgtctccacttctctctccttgcttttgacaaatttctttattcccctctggactaaagtagtggctatttttgtgccactctgcgccccaccctcactgttggccgctccttatccggcctggcctggagggtgacaccatgtcaccctcaccaggactcgtctctccattcccgtcagagtttgctttgatttccctttcctttccttctcggggaccagttcttacttccttttatttttagctctgcactccatgtggtttcagggttcagtctgatccatcaaaaggttctttttttataatcccttttgaaaatgataatcaaaggaagagatgtggtgtttggtcatgtggaaaactcaatgtataatttagacgtctgtcaaaaatccgacaaataaaatttagctggaacgaaaaaaaaaaaaaaaaaaaaaaa

SEQ ID NO: 20 - DNA, 4225 bp, Homo sapiens
ggagtcgcggctgcgagcaggttagagttacttgttattggtaaatagccactatggaggctaaggaccagaagaaacacagaaagaaaaacagtggacccaaagctgcaaagaaaaagaagcggcttctgcaggatctccagctaggagacgaagaagatgcccggaagagaaatcccaaagcttttgcagttcagtctgctgtgcggatggctcgatcctttcacaggactcaggatttgaagacaaaaaagcatcatattccagtggttgatcgaactccactagagcccccaccaatagtggtagtggtgatgggacctccaaaagttggaaagagcactttgatacaatgcctcattcggaactttacccggcagaagttgaccgagatcagaggccctgtgacgattgtgtcaggtaaaaagcgcagactcaccattattgaatgtgggtgtgacattaacatgatgattgatctggctaaagtagcagatctggtactgatgcttatagatgccagctttgggtttgaaatggaaacgtttgagtttctaaacatctgtcaagtacatggctttcctaaaattatgggagttctcacccacctcgactccttcaagcataataagcaactgaagaagacaaagaagcgattaaaacacaggttctggacggaagtttacccgggtgccaagctgttctacctttctggaatggtgcatggagaatatcaaaaccaagaaatccacaatctgggccgttttattacagttatgaagtttaggcctctcacatggcaaacttctcacccttatatcctggcagacaggatggaagatttgacaaacccagaggatatccgaacaaacatcaaatgtgaccggaaggtgtcactttatggttatttaagaggagcacacttgaaaaataaaagccaaattcacatgccaggggtaggagattttgccgtgagtgacatcagtttcctcccagacccttgcgctcttcctgaacaacaaaagaagcgctgtttaaatgagaaggagaagctggtttatgcgcctctttctggagttgggggtgtgctgtatgacaaagacgctgtctatgttgaccttggtggcagccacgtttttcaggatgaagtggggcccacccatgagctggtccagagtctcatctctacccactccaccattgatgccaagatggcttcaagtcgagtgacgctgttttctgattccaagccacttgggtcagaggatatagataatcaagggctaatgatgccaaaggaggaaaaacaaatggacttgaacactggtcgaatgcgtcggaaagccattttcggagatgaagatgaatctggagatagtgatgatgaagaagatgatgaaatgtctgaagatgacgggttggaaaacggctctagtgatgaggaagcagaagaggaggaaaatgctgagatgactgatcagtatatggctgttaagggcatcaaacgacggaaacttgagttggaagaagacagtgaaatggatttgccagcatttgctgacagtgacgatgaccttgagaggagctcagcggaagaaggggaagcggaggaagctgatgaaagcagtgaagaagaggactgcactgcaggagagaagggcatttcaggatcaaaggctgctggagaaggtagtaaagcagggctgtcaccagctaattgccagagtgaccgtgtgaatctggagaagtctttgctgatgaagaaagcagctctccccactttcgattctgggcattgcacagctgaagaggtgtttgcatctgaagatgaatctgaagaaagctcctcactcagtgcagaggaagaagactcagaaaatgaagaggctattagaaaaaagctttcaaagccttctcaagtgagcagtggtcagaaactggggccacagaacttcattgatgagaccagtgatatagaaaatttactcaaagaggaagaagattacaaggaagaaaataatgattccaaagaaacgtcaggtgccctcaagtggaaggaagacctttccagaaaggcagctgaggcctttctgaggcagcagcaagcagctccaaacctccgaaagcttatttatgggacagtgacagaagataatgaagaagaagatgatgatactctagaagagcttggagggttgtttcgtgtcaaccagcctgacagagagtgtaagcacaaggctgactctttggactgctccagatttcttgtggaggccccccatgactgggatttagaggaggttatgaacagtatcagagattgcttcgtgactggaaagtgggaagatgataaagatgcagccaaggtcttagcagaagatgaggagctctacggtgactttgaagacttggaaacaggggacgtgcacaagggaaaatcaggccccaatactcagaatgaagatatagagaaagaagttaaggaagaaattgaccctgacgaagaagaaagtgccaagaaaaagcatttggataagaagagaaaattgaaggagatgtttgatgcagaatatgatgaaggagaaagcacatattttgatgatcttaaaggagaaatgcagaaacaagcacagctgaatcgcgcagaatttgaagatcaagatgatgaagccagagttcagtatgagggttttcgacctgggatgtacgtccgcattgagattgaaaatgttccctgtgaatttgtgcagaactttgacccccattaccccattatcctgggtggcttgggcaacagtgagggaaatgttggctacgtgcagatgcgtctgaagaaacatcgctggtataagaaaatcctcaagtcccgagatccaatcatattttctgtagggtggaggaggtttcagaccatcccactgtattatatcgaagaccacaatggaagacaaaggcttctaaagtataccccacagcacatgcattgcggagcagccttttggggccctatcactccacagggaactggtttcttggcaatacagtctgtcagtggcataatgcctgattttcggatagctgctacaggagttgtccttgatctggataaatccataaaaattgtgaagaaattaaagctaactggttttccatataaaattttcaagaacacttcatttattaagggaatgtttaattctgccttggaagtggccaaatttgaaggtgctgtgattcgaacagtcagtgggataagggggcagatcaagaaagcactccgagctccagaaggagctttcagggccagctttgaggataagctgctgatgagcgatattgtcttcatgcgaacttggtatcctgtttccatcccagcgttctataacccagtaacatctttgttgaaaccagtgggtgagaaagacacctggtcaggaatgcggaccacgggccaactcaggctcgcccatggcatcagactaaaggcgaacaaggactctctgtataagccaatcctgaggcaaaagaaacattttaattcactgcacattccaaaagccttgcagaaggccctgccatttaagaacaagcccaagacccaagcaaaggcaggcaaggtgccaaaggacaggcggagaccggccgtcatacgcgagcctcatgaaagaaagatccttgcactgctggatgctctgagtacggtgcatagtcagaagatgaagaaggccaaggagcagcggcacctgcacaataaagagcacttcagagccaagcagaaggaggaggaggagaagctgaagcggcagaaggacctcaggaagaagctcttcagaattcaggggcagaaggaaagaagaaaccagaagtccagtttgaagggggctgagggccaattgcagtgagcctttggactggagggactgtccctggatctgcggaggtagacagtttcaaacatcacagtttgaatgcctgtgaatgacacgtcagtgggaaagagctcaagagatgtctctactcaaactgtgcctgcaggaggaggaacagagaagcctgggctgctgggactgggttcattctcatgacttggggctgtcgagatttaaagtgatgtaagctgtggttatgtggattctcttactttcctctgcctgcctcagtttaattattttgtcctacagaaatatcattaaaatatttttttgttaaaaaaaaaaaaaaaaaa

SEQ ID NO: 21 - DNA, 1536 bp, Homo sapiens
aacgcaggccgggcgggaagagccaaagcgggcaggcggcggaaatatccgaagcggcggggcgcccgaggccgttgccgacctccgcgctaaagccgctgctgccgcggaagacgatcctccagtacccgcccgccgtcaccgcagctgccgtgtcctcctcccacccctagccgcaccccctcgcggagggatcagctgagcggccaaacggcacggtcgggggagccccgagtccgcagctgcagcggggcctgagaccagagttggcgagggcaaggaaggagcggccccgggcagtgggggcggggccgggcgggcccgagaacagccgaatttggccgagcgctgccgagcgagtccgaggcgctgggccaggccggagccggactacgggagccgaggcgggccgcgcggtgggcgcggagaggagcggagcggcgcggcaggccgggcgggtggcggcagcagcggaggaggccgcagctgcgggtccgaggagcggaggcgacgcgggcggcggcggggggccgggtggccggggtcccgggccccgcggcggcggcagcggcggcggcggcggcaggatgatcaagctgttctcgctgaagcagcagaagaaggaggaggagtcggcgggcggcaccaagggcagcagcaagaaggcgtcggcggcgcagctgcggatccagaaggacataaacgagctgaacctgcccaagacgtgtgatatcagcttctcagatccagacgacctcctcaacttcaagctggtcatctgtcctgatgagggcttctacaagagtgggaagtttgtgttcagttttaaggtgggccagggttacccgcatgatccccccaaggtgaagtgtgagacaatggtctatcaccccaacattgacctcgagggcaacgtctgcctcaacatcctcagagaggactggaagccagtccttacgataaactccataatttatggcctgcagtatctcttcttggagcccaaccccgaggacccactgaacaaggaggccgcagaggtcctgcagaacaaccggcggctgtttgagcagaacgtgcagcgctccatgcggggtggctacatcggctccacctactttgagcgctgcctgaaatagggttggcgcatacccacccccgccacggccacaagccctggcatcccctgcaaatatttattgggggccatgggtaggggtttggggggcggccggtgggggaatcccctgccttggccttgcctccccttcctgccacgtgcccctagttatttttttttttttaacaccatgtgattaaggtcggcgctgcctcccccgacccactcagcgatgggaaatgaattggcttgtctagcccccctgctgggtgcttgttcagcccccactctgggctgtggagtgggtgggcaacgggcctgggtagctgggcccaggcaacccacccctccacctctggaggtcccaccaggctattaaaggggaatgttactgcaaaaaaaaaaaaaaaaaaaaa

SEQ ID NO: 22 - DNA, 1696 bp, Homo sapiens
caaaggacttcctagtgggtgtgaaaggcagcggtggccacagaggcggcggagagatggccttcagcggttcccaggctccctacctgagtccagctgtccccttttctgggactattcaaggaggtctccaggacggacttcagatcactgtcaatgggaccgttctcagctccagtggaaccaggtttgctgtgaactttcagactggcttcagtggaaatgacattgccttccacttcaaccctcggtttgaagatggagggtacgtggtgtgcaacacgaggcagaacggaagctgggggcccgaggagaggaagacacacatgcctttccagaaggggatgccctttgacctctgcttcctggtgcagagctcagatttcaaggtgatggtgaacgggatcctcttcgtgcagtacttccaccgcgtgcccttccaccgtgtggacaccatctccgtcaatggctctgtgcagctgtcctacatcagcttccagaacccccgcacagtccctgttcagcctgccttctccacggtgccgttctcccagcctgtctgtttcccacccaggcccagggggcgcagacaaaaacctcccggcgtgtggcctgccaacccggctcccattacccagacagtcatccacacagtgcagagcgcccctggacagatgttctctactcccgccatcccacctatgatgtacccccaccccgcctatccgatgcctttcatcaccaccattctgggagggctgtacccatccaagtccatcctcctgtcaggcactgtcctgcccagtgctcagaggttccacatcaacctgtgctctgggaaccacatcgccttccacctgaacccccgttttgatgagaatgctgtggtccgcaacacccagatcgacaactcctgggggtctgaggagcgaagtctgccccgaaaaatgcccttcgtccgtggccagagcttctcagtgtggatcttgtgtgaagctcactgcctcaaggtggccgtggatggtcagcacctgtttgaatactaccatcgcctgaggaacctgcccaccatcaacagactggaagtggggggcgacatccagctgacccatgtgcagacataggcggcttcctggccctggggccgggggctggggtgtggggcagtctgggtcctctcatcatccccacttcccaggcccagcctttccaaccctgcctgggatctgggctttaatgcagaggccatgtccttgtctggtcctgcttctggctacagccaccctggaacggagaaggcagctgacggggattgccttcctcagccgcagcagcacctggggctccagctgctggaatcctaccatcccaggaggcaggcacagccagggagaggggaggagtgggcagtgaagatgaagccccatgctcagtcccctcccatcccccacgcagctccaccccagtcccaagccaccagctgtctgctcctggtgggaggtggcctcctcagcccctcctctctgacctttaacctcactctcaccttgcaccgtgcaccaacccttcacccctcctggaaagcaggcctgatggcttcccactggcctccaccacctgaccagagtgttctcttcagaggactggctcctttcccagtgtccttaaaataaagaaatgaaaatgcttgttggca

SEQ ID NO: 23 - DNA, 3649 bp, Homo sapiens
cccgctgtagccgcgtgtgggaggacgcacgggcctgcttcaaagctttgggataacagcgcctccgggggataatgaatgcggagcctccgttttcagtcgacttcagatgtgtctccacttttttccgctgtagccgcaaggcaaggaaacatttctcttcccgtactgaggaggctgaggagtgcactgggtgttcttttctcctctaacccagaactgcgagacagaggctgagtccctgtaaagaacagctccagaaaagccaggagagcgcaggagggcatccgggaggccaggaggggttcgctggggcctcaaccgcacccacatcggtcccacctgcgagggggcgggacctcgtggcgctggaccaatcagcacccacctgcgctcacctggcctcctcccgctggctcccgggggctgcggtgctcaaaggggcaagagctgagcggaacaccggcccgccgtcgcggcagctgcttcacccctctctctgcagccatggggctccctcgtggacctctcgcgtctctcctccttctccaggtttgctggctgcagtgcgcggcctccgagccgtgccgggcggtcttcagggaggctgaagtgaccttggaggcgggaggcgcggagcaggagcccggccaggcgctggggaaagtattcatgggctgccctgggcaagagccagctctgtttagcactgataatgatgacttcactgtgcggaatggcgagacagtccaggaaagaaggtcactgaaggaaaggaatccattgaagatcttcccatccaaacgtatcttacgaagacacaagagagattgggtggttgctccaatatctgtccctgaaaatggcaagggtcccttcccccagagactgaatcagctcaagtctaataaagatagagacaccaagattttctacagcatcacggggccgggggcagacagcccccctgagggtgtcttcgctgtagagaaggagacaggctggttgttgttgaataagccactggaccgggaggagattgccaagtatgagctctttggccacgctgtgtcagagaatggtgcctcagtggaggaccccatgaacatctccatcatcgtgaccgaccagaatgaccacaagcccaagtttacccaggacaccttccgagggagtgtcttagagggagtcctaccaggtacttctgtgatgcaggtgacagccacggatgaggatgatgccatctacacctacaatggggtggttgcttactccatccatagccaagaaccaaaggacccacacgacctcatgttcaccattcaccggagcacaggcaccatcagcgtcatctccagtggcctggaccgggaaaaagtccctgagtacacactgaccatccaggccacagacatggatggggacggctccaccaccacggcagtggcagtagtggagatccttgatgccaatgacaatgctcccatgtttgacccccagaagtacgaggcccatgtgcctgagaatgcagtgggccatgaggtgcagaggctgacggtcactgatctggacgcccccaactcaccagcgtggcgtgccacctaccttatcatgggcggtgacgacggggaccattttaccatcaccacccaccctgagagcaaccagggcatcctgacaaccaggaagggtttggattttgaggccaaaaaccagcacaccctgtacgttgaagtgaccaacgaggccccttttgtgctgaagctcccaacctccacagccaccatagtggtccacgtggaggatgtgaatgaggcacctgtgtttgtcccaccctccaaagtcgttgaggtccaggagggcatccccactggggagcctgtgtgtgtctacactgcagaagaccctgacaaggagaatcaaaagatcagctaccgcatcctgagagacccagcagggtggctagccatggacccagacagtgggcaggtcacagctgtgggcaccctcgaccgtgaggatgagcagtttgtgaggaacaacatctatgaagtcatggtcttggccatggacaatggaagccctcccaccactggcacgggaacccttctgctaacactgattgatgtcaatgaccatggcccagtccctgagccccgtcagatcaccatctgcaaccaaagccctgtgcgccaggtgctgaacatcacggacaaggacctgtctccccacacctcccctttccaggcccagctcacagatgactcagacatctactggacggcagaggtcaacgaggaaggtgacacagtggtcttgtccctgaagaagttcctgaagcaggatacatatgacgtgcacctttctctgtctgaccatggcaacaaagagcagctgacggtgatcagggccactgtgtgcgactgccatggccatgtcgaaacctgccctggaccctggaagggaggtttcatcctccctgtgctgggggctgtcctggctctgctgttcctcctgctggtgctgcttttgttggtgagaaagaagcggaagatcaaggagcccctcctactcccagaagatgacacccgtgacaacgtcttctactatggcgaagaggggggtggcgaagaggaccaggactatgacatcacccagctccaccgaggtctggaggccaggccggaggtggttctccgcaatgacgtggcaccaaccatcatcccgacacccatgtaccgtcctcggccagccaacccagatgaaatcggcaactttataattgagaacctgaaggcggctaacacagaccccacagccccgccctacgacaccctcttggtgttcgactatgagggcagcggctccgacgccgcgtccctgagctccctcacctcctccgcctccgaccaagaccaagattacgattatctgaacgagtggggcagccgcttcaagaagctggcagacatgtacggtggcggggaggacgactaggcggcctgcctgcagggctggggaccaaacgtcaggccacagagcatctccaaggggtctcagttcccccttcagctgaggacttcggagcttgtcaggaagtggccgtagcaacttggcggagacaggctatgagtctgacgttagagtggtggcttccttagcctttcaggatggaggaatgtgggcagtttgacttcagcactgaaaacctctccacctgggccagggttgcctcagaggccaagtttccagaagcctcttacctgccgtaaaatgctcaaccctgtgtcctgggcctgggcctgctgtgactgacctacagtggactttctctctggaatggaaccttcttaggcctcctggtgcaacttaatttttttttttaatgctatcttcaaaacgttagagaaagttcttcaaaagtgcagcccagagctgctgggcccactggccgtcctgcatttctggtttccagaccccaatgcctcccattcggatggatctctgcgtttttatactgagtgtgcctaggttgccccttattttttattttccctgttgcgttgctatagatgaagggtgaggacaatcgtgtatatgtactagaacttttttattaaagaaacttttcccagaaaaaaaaaaaaaa

SEQ ID NO: 24 - DNA, 2869 bp, Homo sapiens
ggtccacccagtgcttgcggcctcgcggccgggccggcctgggctgcaatcaatgcggctttgtctgggacgcccacatcccagaggccattcccgggtcggcaaatcggagcgcggccggggcgcgcgggggtgagataagcggccatgtgatcccacctgggctggaaggggaggggcgccaggtgaggcggcggccggcggggcgcgggcggccacgcggggctcctgcagcatggctgtcagcaggaaggactggtccgcgctgtccagccttgcccggcagaggactctggaggatgaggaggaacaggagcgcgagcgcaggcggcggcaccgcaacctgagctccaccacggacgatgaggctcccaggctcagccagaatggagaccggcaggcctctgcttctgagagactaccgagcgtggaagaagcagaggtgcccaagccactgcccccagcctccaaagatgaggacgaggacatccagagcatcctcagaacacggcaggagcggaggcagaggcggcaggtggtggaggctgcacaggcccccatccaggagaggctggaggcagaggaggggaggaacagcttgagccctgtgcaggccacacagaaacccctagtctccaagaaggaactggaaatcccacctcgccggagactgagtcgggaacagcggggcccctgggccctggaggaggagagcttggtgggcagggagccagaagagaggaagaaaggggttccagaaaagtccccagtcttggagaagtcctccatgccaaagaagacggcacctgaaaagagcctggtctccgataaaacctccatctctgagaaggtgctggcctcagagaagacatctctatcagagaagatagcagtgtcagagaaaagaaacagctcagagaagaagtctgttctagaaaaaaccagtgtctctgagaagtcgctggccccagggatggcactgggctcaggaaggaggctggtgtctgagaaagcttccatctttgagaaggcactggcctcagagaagagcccaactgcagatgctaagccggccccaaagagggccacagcctcagagcagcccctggcgcaggagccgccagcctctgggggaagcccagccaccaccaaggagcagagaggaagggccctccctgggaagaacctgccctctttggcaaagcagggggcttcagaccctccgactgtggcctcccgcctcccacccgtcacactccaggtgaaaatccccagcaaggaggaagaggcagatatgtcctcacccacacagcgaacctacagcagctccctcaaacgctccagccccaggaccatctcctttcggatgaaacccaagaaagaaaactcggaaacaaccctaactcgcagtgccagcatgaagctcccagacaacacagtgaagttgggagagaagctggagagataccacacggccatacggagatcagaatctgtcaagtctcggggtctgccttgcactgagttattcgtggctcctgtgggtgtagccagcaagcgccacctctttgagaaggaactggcgggccagagccgagcagaaccagcctccagccggaaggagaacttgaggctctcaggggttgtgacatcaaggctcaacctgtggatcagcaggacccaggaatctggagatcaggacccccaggaggcacagaaagcatcatctgcaaccgagaggactcagtggggacagaaatctgactcctcgctggacgctgaggtgtgacaagccccgccaagacagacctgcaagtcttcgtctcaagggacctccctcatgccaggcccctgcctctcacagcagcaccctttcctctcattgtccctgttccctttttgcctgtggatctgtttggccagggtccctggggtcaggaatatttgcaagactcagccagctccttcccagcccagcctcttggggctgggactttctcaccctgcggcaggcacaacagatgctgggacccagtctctgcccaggtcacagcacaagtgcacatcagcactatggggcctatgtcctgcccagagacctctgctccttcctgctcacatccacagtcagggcacggcgcccctcaagaactccagagtcacctgtctcatcggctcccagcaagtgcctctttgtctatgatgtcccccttctctgaggcctggacccacccatctttgtccctggggcctgctcccagccactgaggcccgctctggccaggggagaaggagctgccgtgcgtcttccctgtgccccgtctccctgcttggttctcccctcccttccctggccggctgccatggccaggagctaagtgcctttttgtgtgcaaccacttaccctttctctgaaaaacctgttctcaggaaggatctgataaactcatttactctcaggtgtaagagactgatgagaccttagaagcgaattcctctctggaggccttgctttctagcagaggtcacctgaagtgtgtgaggaggatcatcattttcctcatcccccctcttctcacattaaggtggtggcttgccactcagcagtcctagcttggtgactgggaactgccacatacagggccaggcctaccctccttccccacaagccccctccaacccccacccccatgctctggacctcatggctcctatgagcttggagcatggtgaaccatcagagaatctagaaccaaccaagctaggaacatcagcctggtgccctgttaaccccttaaagctgtggtttacaacttttcaaaaatttaaatcattagaaaaaaaaaaaaaaaaaaaaaaaaaaaaaaaa

SEQ ID NO: 25 - DNA, 5039 bp, Homo sapiens
caagccgactgtgagccaggaagtgctcttggggagcccaggccaagccatccattcttgggtcctttggagggtagatatggattcccagtttctccagcggccagtgctccccctagtccacacagtgagaccgtgaaagcagatgctccggggcactcctgggcagcttttgctcagtggatgatgggtgactacagactccctgaccacccccagcccatggaaattctcaacctgtacttgggagacagcctggagccccacccaggagagtgcccaagggaaacgtgcagccatgaggatccaccggagcctttcgaggagcaaacctgggccactgaccctcctgaacctaccagacaaaatgttcctccctggggctccggtgtggagctcacacacctggggagctgggtccatcaggacgggctggagccttgccaggagcaaacccgggccactgaccctcctgaatctaccagacaagatgctcctccctggggctccggtgtggagctcacacacctggggagcccctctgcccagagggagcacaggcagaacacagcatcaccagggtcaccagtgaacagccatctaccggggagcccaaagcagaaccggagcacgtccacacaggtagtgttctgggcaggcatcctgcaggcccagatgtgtgtcctagacctggaggaggagctggagaagacggaagggctcaaggctgggctgaaatgctgtctccccacgccccctgtggacctccccggggacacgggcctgcactccagcccacctgagaatgaagactcaggggaagacagcagtgagcctgagggagagggccaggcatggctgagagagggaaccccagactcttccccacagtggggagctgaggaggagagcatgttcttcagcaaccccctcttcctggcgagtccttgctcagagaacagtgcttctggagagtgcttttcctggggggcttcagactcccatgcaggtgtgaggactggacctgagagcccagcgactctggagcctcccctcccagaagacacagtgctgtgggagctggaaagtgagccagatttgggggacggcgctgctatcagtgggcattgtacccctccattccctgtgcccatctataaaccacactccatctgctgggcctcagtggctgccgctgagggggctcctgcagcacctcctggtcacggggagagtgagggagataggcttggtcctgctccatctgcagcaccgtgtgtggacgaagcattgacctgggaatcaggatgtgtcggatctgatcttggccctgctgcacatcctgtgcaaccttgggcctctctcagccctgagggctggcagagaggaggtcctttttggccccaggtgactcttaactcccaggacagagatgagagggagggtggacacccccaggaatctcttccctgcaccttggccccctgcccctggaggagcccagcttcttctccagagcctagcagcccagaatctgagagcagaggccctggtcccaggcccagccctgcatcgtcccaggagggcagcccgcagcttcaacaccacagctcaggcattttgcccaagtggacactagatgcttcacagtcttcactcttggagacggatggggaacagccaagttccttgaagaaaaaggaggcaggggaggccccaaaaccaggcgaggaagtaaagagtgaaggaacagccaggcctgcagagactggagacgtccagcctgacattcacctgacttctgcagaacatgagaatctgaggacaccgatgaactcttcttggcttcctgggagccctatgccccaagcacagtccccagaggaaggccagagaccaccagctggagacaagctagctaatggcgtcaggaacaacaaggtagcctggaacttggcctcacgcctctatcgcctggagggcttccggaagtctgaagtggctgcctacctgcagaagaacaatgactttagcagggctgtggctgaggagtacctgtccttcttccagtttggaggccagagtctggaccgagccctccggagcttcctccaggccttggtgctcagtggggagactcaggaacgggagcgaatcctctaccagttctccagacgcttccaccattgcaatccggggatcttcccctcagtagattctgtacacaccttgacatgtgcaatcatgctgcttaacacggacctgcatggacagaacattgggaagagcatgagctgccaggaattcataaccaacctgaatgggctgagggatggcgggaacttccccaaggagctgctgaaggccctctactggtctatccgcagcgagaagctcgagtgggccgtggatgaagaagacacagccagacctgagaaggcccagccgtccctgccagctggcaagatgagcaagcccttccttcagctggctcaggatcccacagtgcccacctacaagcagggcatcctggctcggaaaatgcatcaagatgcagacggcaagaagacgccatggggcaagcgtggctggaagatgttccacaccttactgcgagggatggttctctacttcctgaagcagggagaagaccactgtctggagggggagagcttggtggggcagatggtggatgagcccgtgggggtgcaccactcgctggccacccccgccacgcattacaccaagaagccgcacgtcttccagctgcgcacggctgactggcgcctctacctcttccaggcacccactgccaaggagatgagctcctggatcgcgcgcatcaacttggctgcggccacgcactccgcgccgcccttccccgccgctgtgggctcccagcgcagattcgtgcggcccatcctgcccgtgggccccgcccagagctccctggaggagcagcatcgatcccacgagaactgcctggacgctgccgcggacgacctgctggatctacagaggaacctgccggagcggcggggccgtggccgcgagctggaggagcaccgcctgcggaaggagtacctggagtacgagaaaacccgctacgagacctacgtgcagctgctggtggcccgcctgcactgcccctctgatgctctggacctgtgggaggagcagctggggagggaagctggaggcactcgggagcccaagctcagcctgaagaagtcccactcgagcccgtccctgcaccaggatgaggctcccaccacggccaaggtgaagcgcaacatctcagagcgcagaacctaccggaagatcatccctaagcggaaccgcaatcagctgtgaagccagcaccacctcagagacactgttccctgctccagggtagacctgagatgaacctccctggaggagacttatttcaatgagtccaccatgacggatgaggcacctcctttccctgctgaaggacaaaccttgtttccctgtggccctcattcttgtgctccctgaagctttcctaatattgctgtgctccccaccacccccatggcagtccctccgcagccccagtccctggccacgcccaagggaagagggaggtgaggacttgactttcctcccagagctcagcccatgtcaccctccaggccccagaatccagagtggcctcatttcctagacttgctgagaactcagcacttgtttgagaaccagtgcttatgtggtgtgcccttggcttctgggggagagcttggggcagcagaggcccctgggcagcccagccaggggagccacagccccgaggatggtcttgctctgggaattaggtgaccttcctggggaggccccaggagagtgaatcagggactcttgagaaattcctaaccagcctcctgtgacccagggagcagggtcgctaaggtcctgcccactgaggggacagccttctgggcagggacctcggggggcttcaagggctctgcacggctgtggggccctgtgcctttgtctccttgtgtctcctttcccccgaagtagatgaaacagtctcacatacccaactgctcatcaacagagcagagctgatggcatgagtgagggctgggcggggtggggcctccagagctttgcagggaaccctggaaccctaggaacaaggagcctttgttccaacagagcagagaaggaggttctctatgttcagaccactggagaggatagagaggtaaaaggtggcgacagtttcccttaggggtctgcctggcaggagccacagctcaggagagttgtgagggatgggacggaggctggcgaccaggcgaggcctaggccaggctcgggagacttttctgtgctcctttctacacatgccttaaaccttccttcctgtggggtgcctggaccccttccccatctctggcagctcagagggtctctgctgctctcccctgggaaatcccctcatcctgccctctggctgcctcccagctgggcttgttctctgagggaggttccggagactcatggacttggggctctgcctgtaggaaggaggctgggccggagggaccagccaccattgtctctgttcagccaagtgtgcaagtaggctgcccgccaagagggggcctctgctacccgctgctgcctgccggctgacacactgcctccccagccttcctgctaggccaccctcctcccttcccatgcttgtaaccagctctggggcttgcacctccacaaagtaaggttggcccttggaggccatgtttgggtctccggccagggcctagggctaggccatgcacccaatgggtgcacaataaataacaggtcaacaaagagggaggtgtgtcagtgtgtgaggaagggaggtcaggcagctaggaccacctgcagtgtggcaggcttcatccctctttgctccaagtgtgtatgtgtgtctgtgcatgtgtgtagtgtctgtgtctgtgtgttcatgcatatgcaggagtcacacggtcataggccatcaaagctggaggaga

SEQ ID NO: 26 - DNA, 562 bp, Homo sapiens
  misc_feature (1)..(562): n = a,c,t, or g
gaaattcaggcgatttattgtaaacaggataaccctagcactccaccatactggctgtgtcacatgctccctctttcacatcaactggtcaaaaaagaagactttcttaagaagcctcaggtaactaataacttagttccacaaatctcatttactaagcactgcgtaaactgcagtatctggggtagtctgttattgctcatggactgcagcttggacccatctaaatgaatccattagtatgcctgagtgatcaacagcagctctagatccaacctggaaattggaaaatgctgacgcataccaaacaattgcaggttcatgggaagactacatgagattgctctcagatctcttcatgtgtcattctcataaaaaagacacttaaatttcacccattttttaaaaaagagctaaaagttactcaatagcacataattttccacataaaaggtaggtggatttttatttactagtacagtgggtggatcggnacactcaggcctaanttcagatctggtcctggtataacctgcaggtttaatggaaagctggcaagtct

SEQ ID NO: 27 - DNA, 3279 bp, Homo sapiens
ccggctcgaagcgcaacgaggaagcgtttgcggtgatcccggcgactgcgctggctaatgcggtaccggctagcgtggcttctgcaccccgcactgcccagcaccttccgctcagtcctcggcgcccgcctgccgcctccggagcgcctgtgtggtttccaaaaaaagacttacagcaaaatgaataatccagccatcaagagaataggaaatcacattaccaagtctcctgaagacaagcgagaatatcgagggctagagctggccaatggtatcaaagtacttcttatgagtgatcccaccacggataagtcatcagcagcacttgatgtgcacataggttcattgtcggatcctccaaatattgctggcttaagtcatttttgtgaacatatgctttttttgggaacaaagaaataccctaaagaaaatgaatacagccagtttctcagtgagcatgcaggaagttcaaatgcctttactagtggagagcataccaattactattttgatgtttctcatgaacacctagaaggtgccctagacaggtttgcacagttttttctgtgccccttgttcgatgaaagttgcaaagacagagaggtgaatgcagttgattcagaacatgagaagaatgtgatgaatgatgcctggagactctttcaattggaaaaagctacagggaatcctaaacaccccttcagtaaatttgggacaggtaacaaatatactctggagactagaccaaaccaagaaggcattgatgtaagacaagagctactgaaattccattctgcttactattcatccaacttaatggctgtttgtgttttaggtcgagaatctttagatgacttgactaatctggtggtaaagttattttctgaagtagagaacaaaaatgttccattgccagaatttcctgaacaccctttccaagaagaacatcttaaacaactttacaaaatagtacccattaaagatattaggaatctctatgtgacatttcccatacctgaccttcagaaatactacaaatcaaatcctggtcattatcttggtcatctcattgggcatgaaggtcctggaagtctgttatcagaacttaagtcaaagggctgggttaatactcttgttggtgggcagaaggaaggagcccgaggttttatgttttttatcattaatgtggacttgaccgaggaaggattattacatgttgaagatataattttgcacatgtttcaatacattcagaagttacgtgcagaaggacctcaagaatgggttttccaagagtgcaaggacttgaatgctgttgcttttaggtttaaagacaaagagaggccacggggctatacatctaagattgcaggaatattgcattattatcccctagaagaggtgctcacagcggaatatttactggaagaatttagacctgacttaatagagatggttctcgataaactcagaccagaaaatgtccgggttgccatagtttctaaatcttttgaaggaaaaactgatcgcacagaagagtggtatggaacccagtacaaacaagaagctataccggatgaagtcatcaagaaatggcaaaatgctgacctgaatgggaaatttaaacttcctacaaagaatgaatttattcctacgaattttgagattttaccgttagaaaaagaggcgacaccataccctgctcttattaaggatacagtcatgagcaaactttggttcaaacaagatgataagaaaaaaaagccgaaggcttgtctcaactttgaatttttcagcccatttgcttatgtggaccccttgcactgtaacatggcctatttgtaccttgagctcctcaaagactcactcaacgagtatgcatatgcagcagagctagcaggcttgagctatgatctccaaaataccatctatgggatgtatctttcagtgaaaggttacaatgacaagcagccaattttactaaagaagattattgagaaaatggctacctttgagattgatgaaaaaagatttgaaattatcaaagaagcatatatgcgatctcttaacaatttccgggctgaacagcctcaccagcatgccatgtactacctccgcttgctgatgactgaagtggcctggactaaagatgagttaaaagaagctctggatgatgtaacccttcctcgccttaaggccttcatacctcagctcctgtcacggctgcacattgaagcccttctccatggaaacataacaaagcaggctgcattaggaattatgcagatggttgaagacaccctcattgaacatgctcataccaaacctctccttccaagtcagctggttcggtatagagaagttcagctccctgacagaggatggtttgtttatcagcagagaaatgaagttcacaataactgtggcatcgagatatactaccaaacagacatgcaaagcacctcagagaatatgtttctggagctcttctgtcagattatctcggaaccttgcttcaacaccctgcgcaccaaggagcagttgggctatatcgtcttcagcgggccacgtcgagctaatggcatacagagcttgagattcatcatccagtcagaaaagccacctcactacctagaaagcagagtggaagctttcttaattaccatggaaaagtccatagaggacatgacagaagaggccttccaaaaacacattcaggcattagcaattcgtcgactagacaaaccaaagaagctatctgctgagtgtgctaaatactggggagaaatcatctcccagcaatataattttgacagagataacactgaggttgcatatttaaagacacttaccaaggaagatatcatcaaattctacaaggaaatgttggcagtagatgctccaaggagacataaggtatccgtccatgttcttgccagggaaatggattcttgtcctgttgttggagagttcccatgtcaaaatgacataaatttgtcacaagcaccagccttgccacaacctgaagtgattcagaacatgaccgaattcaagcgtggtctgccactgtttccccttgtgaaaccacatattaacttcatggctgcaaaactctgaagattccccatgcatgggaaagtgcaagtggatgcattcctgagtcttccagagcctaagaaaatcatcttggccactttaatagtttctgattcactattagagaaacaaacaaaaaattgtcaaatgtcattatgtagaaatattataaatccaaagtaa

SEQ ID NO: 28 - DNA, 573 bp, Homo sapiens
tagtcgcctgaggattttttattgtgttttccacatagataaaaaaataaggctttttgatgaaaagaatccattacaaagtcaaaaatccattacaattataattgaatcagtaacaaaatttagctttaaatgagtcaagtattctgcatttgaaatttaatatcacaaacattcaagattagtgaattttggtaagaaaaaaatactagaagaaaggaaaaggacaccttttcaacagatagtaatttataaaaatttttttaaaagtgctttgggaaaacacacagtatcattacttaagaaaagtcatttaaggaagacttaagtgcttcaagtggagtgtattacagactaaaaaatgttttaaaatttgccaagaaatttaagtgttaaaaatactcttctccttattcagtttcatgtttaaggaaacatttgacagacaagtaaaccaaacgcaaaaaaaagttcacctgcattttaaactaataaattctggatctgtaaaagctcttggtttgtacacagaggccaatgctgacatttattgatctatttttatgtagttaa

SEQ ID NO: 29 - DNA, 6256 bp, Homo sapiens
cgcgccgccgctcgctcacctgcgctcccgcccgcccctcggtgcgcgcccggcccgccagccgccgccgcccgcaccccgagcgccaccatgaactcgctcttcaggaagagaaacaaaggcaaatacagccccactgtgcagacccggagcatctctaacaaggagctctcggagctgatcgagcagctgcagaagaatgccgaccaggtggagaagaacatcgtggacacagaggccaagatgcagagtgacctggctcggctgcaggagggtcggcagcctgagcaccgggacgtgaccctgcagaaggtgttggactctgagaagctgctctatgtgctagaggcggatgcggccattgccaagcacatgaagcacccacagggggacatgatcgccgaggatatccgccagctgaaggagcgtgtgaccaacctgcgcgggaaacacaagcagatctacaggctggcggtgaaggaagtggatccacaggtcaactgggcggcactggtggaggagaagctggacaagctgaacaaccagagctttgggactgacctgccgctggtggaccaccaagtggaggagcataacatcttccacaatgaggtcaaggccatcgggccccacctggccaaggacggggacaaggagcagaacagcgaactccgggccaagtaccagaaactgctggcagcatcacaggcccggcagcagcacctgagttcgctgcaggactacatgcagcgctgcaccaatgagctgtactggctggaccagcaggccaagggccgcatgcagtacgactggagtgaccgcaacctcgactaccccagccgccggcgccagtatgagaatttcatcaaccggaacctggaggccaaagaggagagaatcaacaaactgcacagcgagggcgaccagctgctggcggccgagcaccccgggaggaactccattgaggcgcacatggaggctgtgcacgcagactggaaggagtacctgaacctgctcatctgcgaggagagccacctcaagtacatggaggactaccaccagtttcacgaagacgtgaaggacgctcaggagctgctgcgcaaggtggactcggacctgaaccagaagtatggccctgacttcaaggaccggtaccagattgagctgctgctgcgggagctggatgaccaggagaaggtgctggacaagtatgaggacgtggtgcaggggctgcagaagcgaggccagcaggtggtgcccctcaagtaccgccgggagactccgctcaagcccatccccgtggaggcactctgtgactttgagggggagcagggcctgatctcgcggggctacagctacaccctgcagaagaacaacggggagagctgggagctcatggacagcgctgggaacaagctgattgctccggccgtctgttttgtgatcccccccacagaccctgaggccctggctctggctgacagcctgggcagccagtaccggagcgtgcggcagaaggcagctgggagcaaacgcacgctgcagcagcggtatgaggtgctgaagaccgagaatcccggagatgcctctgacctacaggggcggcagctgctggctggcttggacaaggtggccagcgacctggaccggcaggagaaggccatcacagggatcctgcggccaccactggagcaaggccgggctgtgcaggacagtgccgagcgggccaaggacctcaagaacatcaccaacgagctactgcggattgaacctgagaagacgcggagcacggctgagggcgaagccttcatccaggccctcccaggcagtggcaccacacccctgctgaggacccgggtggaggacaccaaccggaaatacgagcacctcctgcagctgctggacttggcccaggagaaggttgatgtggccaaccgcctggagaagagcctgcagcagagctgggagttgctggccacacacgagaaccatctgaatcaggatgacacagtgcctgagagcagccgtgtcctggacagcaaggggcaggagctggcggccatggcctgtgagttacaggcccagaagtccctcctgggtgaggtggagcagaacttgcaggcggccaagcagtgctcgagcacactggccagccgcttccaggagcactgcccggacctggagcgccaggaggccgaggtgcacaagctgggccagcgtttcaacaacctgcgccagcaggtggaacgcagggcgcagagcctacagagcgccaaggcagcctacgagcacttccaccgcggccatgaccacgtgctgcagttcctagtcagcatccccagttacgagccccaggagacagacagcctcagccagatggagaccaagctgaagaaccagaagaacctgctagatgagatagcaagtagggagcaggaagtacagaagatctgtgccaattcccagcagtaccagcaagctgtaaaggactatgagttagaagcagaaaaactaaggtctcttctcgacttggagaatggaaggagcagccacgtgagcaagagagccaggctccaatctcctgccaccaaagtgaaggaagaggaagcagcacttgccgccaagttcactgaagtttatgccatcaacagacagaggctgcagaatctggagtttgctctgaatctcctcagacagcagccggaagtagaagtgacccatgagaccctgcaaaggaataggccggactctggagtggaggaggcgtggaagatcaggaaggaactggatgaggagactgagcggaggcggcagctggagaacgaggtcaagagcacccaggaagaaatctggaccttgaggaatcaggggcctcaggaatcggtggtgaggaaggaggtgctcaagaaggtgccggatcccgtgctggaggagagcttccagcagctgcagcggacgctggcagaggagcagcacaagaaccagctgctgcaggaggagctggaggcactgcagctgcagctgcgtgccctggagcaggagaccagagacggggggcaggagtacgtggtcaaggaggtcctgcgcatcgagcctgacagggcccaggcggatgaggtcttgcagctgcgggaggagctggaggcactgaggcggcagaagggcgcccgggaggcagaggtgctcctcctgcagcagcgtgtggccgccctggctgaagagaagagccgggcgcaggagaaggtcacagagaaagaggtggtgaaactgcagaatgacccccagctggaggcagagtaccagcagctgcaggaggaccaccagcgccaggaccagctcagggagaagcaggaggaggagctgagcttcctccaggacaagctcaagaggctagagaaggagcgggccatggccgagggcaagatcaccgtcaaggaggtgctcaaggtggagaaggacgcggccaccgagagggaggtcagcgatctcacccgccaatatgaggacgaggctgccaaggctcgcgctagccagagggagaagacggagctgctccgaaagatatgggccttggaggaggagaacgccaaagtggtggtgcaggagaaggtgcgggagatcgtgcggccagaccccaaggcggaaagtgaagtggcgaacctccgcctggagcttgtggagcaggagcgaaagtaccggggtgccgaggagcagctccggagctaccagagtgagctggaggccctcaggaggcgaggcccccaggtggaagtcaaagaggtgactaaggaagtcattaagtacaagactgaccctgagatggagaaggagcttcagcggctcagggaggagatcgtggacaagaccagactgatcgaaaggtgtgatttagagatctaccagctgaaaaaggaaatccaggccctgaaagacaccaaaccccaggtccagaccaaagaggtggtccaggagatcctccaattccaagaagaccctcaaaccaaggaggaggtggcgtctctgagggcaaagctctcagaggagcagaagaaacaagtggatctggagagggaaagagcttcccaggaagagcagatcgcccggaaagaggaggagctctcgcgggtgaaggaaagggtggtgcagcaggaggtggtcaggtatgaggaggagccaggcctgcgggccgaggcgagcgcctttgccgagagcatcgatgtggagctgcggcagattgacaagctgcgggcagagctgcggcggctgcagcgccggcgcaccgagcttgagcggcagctggaggagctagagcgcgagcggcaggcccgcagggaggccgagcgcgaggtacagcggttgcagcagcggctggcagcgctggagcaggaagaagctgaggcccgtgagaaggtaacccatacgcagaaggtggtgctgcagcaggacccgcagcaggcgcgagagcatgccctgctccgactccagctggaagaagagcagcaccggcggcagctcctggagggggagctcgagaccctccggaggaaactggctgcactggagaaggcggaggtcaaggagaaggtggtgctctccgagagtgtccaggtggagaagggcgacaccgagcaagagatccagaggctcaagagcagcctggaggaggagagccgcagcaagcgcgagctggacgtcgaggtgagccggctggaagccaggctttcggagctggaattccataactccaagtcatccaaggaactagactttctgagggaagagaaccacaaattacagctggagaggcaaaacctgcagctggagacccgaaggctccaatcggaaatcaacatggcagcgacggaaacacgagacctgcggaacatgaccgtggcggactctgggaccaaccatgactccagactgtggtccctggagagggaactggatgacctcaagaggctctccaaggacaaagacctcgagatcgacgagctgcagaagcgcctgggctccgtggccgtcaagcgggagcagcgggagaaccacctgcggcgctccatcgtagtcatccaccctgacacaggccgcgagctgtccccggaggaagcccaccgtgccgggctcattgactggaacatgttcgtgaaactcagaagccaggagtgcgactgggaggagatctcagtgaagggtcccaatggggagtcctcagtgatacacgacaggaagtctggcaagaagttctccatcgaagaggccctgcagagtggcaggctgacccctgctcagtatgaccgctatgtcaacaaggatatgtccatccaggagctggcggtcttggtatctgggcagaagtaggcacagctcttgcaactcttcgtaacggcagacgctggccctctcctacgacgcagtgacctccttggtgtcgtcctctccctagccctggtgcaggccaagcattttatacataccctcgctgccaggctgctcagagtcccgcccacatatgagacaggcactggctgaagacaggcaactctcgtcccaaccatcattcaccctgagtgacgtacttcatcctccaatgactggacaactgcgatgccttttcctcccttttcctgtacactcccagcaacaaactcctcatgataactgcacacaatctgaaaaccactgaaggacaagccaaccacagcagccaagcccactccttgcagcatgggtactggtggcacaccagacagtgacactgccccacaaaggcctgggcccgtgggggctgctgcctggcatgacatctctccagatttctggcttaaaaccaactttccatccgagaagcctcctcagtagttactctgctcatgagacagatctgggctccaagccaggaaaggtgaacagaaaccacaagtgtccagccctcggtgctggagtggacgttaattgtcagccaccagactgtcccggcacctacagagaatgtttcacagttctggcatttaaatcctttgatagtggattgtgctgctgttagccttagtttcagtgctttacaagtctcgcttattatctcattggtatttaggtatacaaaacagttgattattcaccacgccaatatctgggtctctgtatctcatgtagaacataagaaaatgggaactaatagggaaatttatttatagcatgaaaataaacctggtggctggagtctgcttgtacggtcaaaaaaaaaaaaaaaaaa

SEQ ID NO: 30 - DNA, 3448 bp, Homo sapiens
gactgggtcatccctccaatcaacttgccagaaaactccaggggaccttttcctcaagagcttgtcaggatcaggtctgatagagataaaaacctttcactgcggtacagtgtaactgggccaggagctgaccagcctccaactggtatcttcattctcaaccccatctcgggtcagctgtcggtgacaaagcccctggatcgcgagcagatagcccggtttcatttgagggcacatgcagtagatattaatggaaatcaagtggagaaccccattgacattgtcatcaatgttattgacatgaatgacaacagacctgagttcttacaccaggtttggaatgggacagttcctgagggatcaaagcctggaacatatgtgatgaccgtaacagcaattgatgctgacgatcccaatgccctcaatgggatgttgaggtacagaatcgtgtctcaggctccaagcaccccttcacccaacatgtttacaatcaacaatgagactggtgacatcatcacagtggcagctggacttgatcgagaaaaagtgcaacagtatacgttaataattcaagctacagacatggaaggcaatcccacatatggcctttcaaacacagccacggccgtcatcacagtgacagatgtcaatgacaatcctccagagtttactgccatgacgttttatggtgaagttcctgagaacagggtagacatcatagtagctaatctaactgtgaccgataaggatcaaccccatacaccagcctggaacgcagtgtacagaatcagtggcggagatcctactggacggttcgccatccagaccgacccaaacagcaacgacgggttagtcaccgtggtcaaaccaatcgactttgaaacaaataggatgtttgtccttactgttgctgcagaaaatcaagtgccattagccaagggaattcagcacccgcctcagtcaactgcaaccgtgtctgttacagttattgacgtaaatgaaaacccttattttgcccccaatcctaagatcattcgccaagaagaagggcttcatgccggtaccatgttgacaacattcactgctcaggacccagatcgatatatgcagcaaaatattagatacactaaattatctgatcctgccaattggctaaaaatagatcctgtgaatggacaaataactacaattgctgttttggaccgagaatcaccaaatgtgaaaaacaatatatataatgctactttccttgcttctgacaatggaattcctcctatgagtggaacaggaacgctgcagatctatttacttgatattaatgacaatgcccctcaagtgttacctcaagaggcagagacttgcgaaactccagaccccaattcaattaatattacagcacttgattatgacattgatccaaatgctggaccatttgcttttgatcttcctttatctccagtgactattaagagaaattggaccatcactcggcttaatggtgattttgctcagcttaatttaaagataaaatttcttgaagctggtatctatgaagttcccatcataatcacagattcgggtaatcctcccaaatcaaatatttccatcctgcgcgtgaaggtttgccagtgtgactccaacggggactgcacagatgtggacaggattgtgggtgcggggcttggcaccggtgccatcattgccatcctgctctgcatcatcatcctgcttatccttgtgctgatgtttgtggtatggatgaaacgccgggataaagaacgccaggccaaacaacttttaattgatccagaagatgatgtaagagataatattttaaaatatgatgaagaaggtggaggagaagaagaccaggactatgacttgagccagctgcagcagcctgacactgtggagcctgatgccatcaagcctgtgggaatccgacgaatggatgaaagacccatccacgccgagccccagtatccggtccgatctgcagccccacaccctggagacattggggacttcattaatgagggccttaaagcggctgacaatgaccccacagctccaccatatgactccctgttagtgtttgactatgaaggcagtggctccactgctgggtccttgagctcccttaattcctcaagtagtggtggtgagcaggactatgattacctgaacgactgggggccacggttcaagaaacttgctgacatgtatggtggaggtgatgactgaacttcagggtgaacttggtttttggacaagtacaaacaatttcaactgatattcccaaaaagcattcagaagctaggctttaactttgtagtctactagcacagtgcctgctggaggctttggcataggctgcaaaccaatttgggctcagagggaatatcagtgatccatactgtttggaaaaacactgagctcagttacacttgaattttacagtacagaagcactgggattttatgtgcctttttgtacctttttcagattggaattagttttctgtttaaggctttaatggtactgatttctgaaacgataagtaaaagacaaaatattttgtggtgggagcagtaagttaaaccatgatatgcttcaacacgcttttgttacattgcatttgcttttattaaaatacaaaattaaacaaacaaaaaaactcatggagcgattttattatcttgggggatgagaccatgagattggaaaatgtacattacttctagttttagactttagtttgttttttttttttttcactaaaatcttaaaacttactcagctggttgcaaataaagggagttttcatatcaccaatttgtagcaaaattgaattttttcataaactagaatgttagacacattttggtcttaatccatgtacacctttttatttctgtatttttccacttcactgtaaaaatagtatgtgtacataatgttttattggcatacgtctatggagaagtgcagaaacttcagaacatgtgtatgtattatttggactatggattcaggttttttgcatgtttatatctttcgttatggataaagtatttacaaaacagtgacatttgattcaattgttgagctgtagttagaatactcaatttttaatttttttaatttttttattttttattttctttttggtttggggagggagaaaagttcttagcacaaatgttttacataatttgtaccaaaaaaaaaaaaaaaggaaaggaaagaaaggggtggcctgacactggtggcactactaagtgtgtgtttttttaaaaaaaaaatggaaaaaaaaaagcctttaaactggagagacttctgacaacagctttgcctctgtattgtgtaccagaatataaatgatacacctctgaccccagcgttctgaataaaatgctaattttggataacaaaaaaaggggaattc

SEQ ID NO: 31 - DNA, 4122 bp, Homo sapiens
tttgtcatcagctcgctctccattggcggggagcggagagcagcgaagaagggggtggggaggggaggggaagggaagggggtggaaactgcctggagccgtttctccgcgccgctgttggtgctgccgctgcctcctcctcctccgccgccgccgccgccgccgccgcctcctccggctcttcgctcggcccctctccgcctccatgtgccggatagcgggagcgctgcggaccctgctgccgctgctggcggccctgcttcaggcgtctgtagaggcttctggtgaaatcgcattatgcaagactggatttcctgaagatgtttacagtgcagtcttatcgaaggatgtgcatgaaggacagcctcttctcaatgtgaagtttagcaactgcaatggaaaaagaaaagtacaatatgagagcagtgagcctgcagattttaaggtggatgaagatggcatggtgtatgccgtgagaagctttccactctcttctgagcatgccaagttcctgatatatgcccaagacaaagagacccaggaaaagtggcaagtggcagtaaaattgagcctgaagccaaccttaactgaggagtcagtgaaggagtcagcagaagttgaagaaatagtgttcccaagacaattcagtaagcacagtggccacctacaaaggcagaagagagactgggtcatccctccaatcaacttgccagaaaactccaggggaccttttcctcaagagcttgtcaggatcaggtctgatagagataaaaacctttcactgcggtacagtgtaactgggccaggagctgaccagcctccaactggtatcttcattatcaaccccatctcgggtcagctgtcggtgacaaagcccctggatcgcgagcagatagcccggtttcatttgagggcacatgcagtagatattaatggaaatcaagtggagaaccccattgacattgtcatcaatgttattgacatgaatgacaacagacctgagttcttacaccaggtttggaatgggacagttcctgagggatcaaagcctggaacatatgtgatgaccgtaacagcaattgatgctgacgatcccaatgccctcaatgggatgttgaggtacagaatcgtgtctcaggctccaagcaccccttcacccaacatgtttacaatcaacaatgagactggtgacatcatcacagtggcagctggacttgatcgagaaaaagtgcaacagtatacgttaataattcaagctacagacatggaaggcaatcccacatatggcctttcaaacacagccacggccgtcatcacagtgacagatgtcaatgacaatcctccagagtttactgccatgacgttttatggtgaagttcctgagaacagggtagacatcatagtagctaatctaactgtgaccgataaggatcaaccccatacaccagcctggaacgcagtgtacagaatcagtggcggagatcctactggacggttcgccatccagaccgacccaaacagcaacgacgggttagtcaccgtggtcaaaccaatcgactttgaaacaaataggatgtttgtccttactgttgctgcagaaaatcaagtgccattagccaagggaattcagcacccgcctcagtcaactgcaaccgtgtctgttacagttattgacgtaaatgaaaacccttattttgcccccaatcctaagatcattcgccaagaagaagggcttcatgccggtaccatgttgacaacattcactgctcaggacccagatcgatatatgcagcaaaatattagatacactaaattatctgatcctgccaattggctaaaaatagatcctgtgaatggacaaataactacaattgctgttttggaccgagaatcaccaaatgtgaaaaacaatatatataatgctactttccttgcttctgacaatggaattcctcctatgagtggaacaggaacgctgcagatctatttacttgatattaatgacaatgcccctcaagtgttacctcaagaggcagagacttgcgaaactccagaccccaattcaattaatattacagcacttgattatgacattgatccaaatgctggaccatttgcttttgatcttcctttatctccagtgactattaagagaaattggaccatcactcggcttaatggtgattttgctcagcttaatttaaagataaaatttcttgaagctggtatctatgaagttcccatcataatcacagattcgggtaatcctcccaaatcaaatatttccatcctgcgcgtgaaggtttgccagtgtgactccaacggggactgcacagatgtggacaggattgtgggtgcggggcttggcaccggtgccatcattgccatcctgctctgcatcatcatcctgcttatccttgtgctgatgtttgtggtatggatgaaacgccgggataaagaacgccaggccaaacaacttttaattgatccagaagatgatgtaagagataatattttaaaatatgatgaagaaggtggaggagaagaagaccaggactatgacttgagccagctgcagcagcctgacactgtggagcctgatgccatcaagcctgtgggaatccgacgaatggatgaaagacccatccacgctgagccccagtatccggtccgatctgcagccccacaccctggagacattggggacttcattaatgagggccttaaagcggctgacaatgaccccacagctccaccatatgactccctgttagtgtttgactatgaaggcagtggctccactgctgggtccttgagctcccttaattcctcaagtagtggtggtgagcaggactatgattacctgaacgactgggggccacggttcaagaaacttgctgacatgtatggtggaggtgatgactgaacttcagggtgaacttggtttttggacaagtacaaacaatttcaactgatattcccaaaaagcattcagaagctaggctttaactttgtagtctactagcacagtgcttgctggaggctttggcataggctgcaaaccaatttgggctcagagggaatatcagtgatccatactgtttggaaaaacactgagctcagttacacttgaattttacagtacagaagcactgggattttatgtgcctttttgtacctttttcagattggaattagttttctgtttaaggctttaatggtactgatttctgaaacgataagtaaaagacaaaatattttgtggtgggagcagtaagttaaaccatgatatgcttcaacacgcttttgttacattgcatttgcttttattaaaatacaaaattaaacaaacaaaaaaactcatggagcgattttattatcttgggggatgagaccatgagattggaaaatgtacattacttctagttttagactttagtttgttttttttttttcactaaaatcttaaaacttactcagctggttgcaaataaagggagttttcatatcaccaatttgtagcaaaattgaattttttcataaactagaatgttagacacattttggtcttaatccatgtacacttttttatttctgtatttttccacttcactgtaaaaatagtatgtgtacataatgttttattggcatagtctatggagaagtgcagaaacttcagaacatgtgtatgtattatttggactatggattcaggttttttgcatgtttatatctttcgttatggataaagtatttacaaaacagtgacatttgattcaattgttgagctgtagttagaatactcaatttttaatttttttaatttttttattttttattttctttttggtttggggagggagaaaagttcttagcacaaatgttttacataatttgtaccaaaaaaaaaaaaaaggaaaggaaagaaaggggtggcctgacactggtggcactactaagtgtgtgttttttaaaaaaaaaaatggaaaaaaaaaagcttttaaactggagagacttctgacaacagctttgcctctgtattgtgtaccagaatataaatgatacacctctgaccccagcgttctgaataaaatgctaattttggaaaaaaaaaaaaaaaaa

SEQ ID NO: 32 - DNA, 4471 bp, Homo sapiens
gcggaacgctagcggtgttggcgcggagtggaccccggctgcggcccctggcaatggcgccaccatcggtcccggagtcccagtgatgctctgtgccatagagcccccataacttcactactacgtgatagtaaatccccggcaaaaaccagcagcgccttgcaagcccacgccaccccaagcatcccaggactcttctgaaacgactccgggctaccagatcggccgtccagctggaatcaaccgatggaggctccgctgcaaactggaatggtgcttggcgtgatgatcggggccggagtggcggtggtggtcacggccgtgctcatcctcctggtggtgcggaggctgcgagtgccaaaaaccccagccccggatggcccccggtatcggttccggaagagggacaaagtgctcttctatggccggaagattatgcggaaggtgtcacaatccacctcctccctcgtggatacctctgtctccgccacctcccggccacgcatgaggaagaaactgaagatgctcaacattgccaagaagatcctgcgcatccagaaagagacgcccacgctgcagcggaaggagcccccgcccgcagtgctagaagctgacctgaccgagggcgacctggctaactcccatctgccctctgaagtgctttatatgctcaagaacgtccgggtgctgggccacttcgagaagccactcttcctggagctctgccgccacatggtcttccagcggctgggccagggtgactacgtcttccggccgggccagccagatgccagcatctacgtggtgcaggacgggctgctggagctctgtctgccagggcctgacgggaaggagtgtgtggtgaaggaagtggttcctggggacagcgtcaacagccttctcagcatcctggatgtcatcaccggtcaccagcatccccagcggaccgtgtctgcccgggcggcccgggactccacggtgctgcgcctgccggtggaagcattctccgcggtcttcaccaagtacccggagagcttggtgcgggtcgtgcagatcatcatggtgcggctgcagcgagtcaccttcctggcactgcacaactacctgggtctgaccaatgagctcttcagccacgagatccagcccctgcgtctgttccccagccccggcctcccaactcgcaccagccctgtgcggggctccaagagaatggtcagcacctcagctacagacgagcccagggagaccccagggcggccacccgatcccaccggggccccgctgcctggacctacaggggaccctgtgaagcccacatccctggaaaccccctcgccccctctgctgagccgctgcgtctccatgccaggggacatctcaggcttgcagggtggcccccgctccgacttcgacatggcctatgagcgtggccggatctccgtgtccctgcaagaagaggcctccggggggtccctggcagcccccgctcggacccccactcaggagcctcgtgagcagccggcaggcgcctgtgaatacagctactgtgaggatgagtcggccactggtggctgccctttcgggccctaccagggccgccagaccagcagcatcttcgaggcagcaaagcaggagctggccaagctgatgcggattgaggacccctccctcctgaacagcagagtcttgctgcaccacgccaaagctggcaccatcattgcccgccagggagaccaggacgtgagcctgcacttcgtgctctggggctgcctgcacgtgtaccagcgcatgatcgacaaggcggaggacgtgtgcctgttcgtagcgcagcccggggaactggtggggcagctggcggtgctcactggcgaacctctcatcttcacactgcgagcccaacgcgactgcaccttcctgcggatctccaagtccgacttctatgagatcatgcgcgcacagcccagtgtggtgctgagtgcggcgcacacggtggcagccaggatgtcgcccttcgtgcgccagatggacttcgccatcgactggactgcagtggaggcgggacgcgcgctgtacaggcagggcgaccgctccgactgcacttacatcgtgctcaatgggcggctgcgtagcgtgatccagcgaggcagtggcaagaaggagctggtgggcgagtacggccgcggcgacctcatcggcgtggtggaggcactgacccggcagccgcgagccacgacggtgcacgcggtgcgcgacacggagctggccaagcttcccgagggcaccttgggtcacatcaaacgccggtacccgcaggtcgtgacccgccttatccacctactgagccagaaaattctagggaatttgcagcagctgcaaggacccttcccagcaggctctgggttgggtgtgcccccacactcggaactcaccaacccagccagcaacctggcaactgtggcaatcctgcctgtgtgtgctgaggtccccatggtggccttcacgctggagctgcagcacgccctgcaggccatcggtccgacgctactccttaacagtgacatcatccgggcacgcctgggggcctccgcactggatagcatccaagagttccggctgtcagggtggctggcccagcaggaggatgcacaccgtatcgtactctaccagacggacgcctcgctgacgccctggaccgtgcgctgcctgcgacaggccgactgcatcctcattgtgggcctgggggaccaggagcctaccctcggccagctggagcagatgctggagaacacggctgtgcgcgcccttaagcagctagtcctgctccaccgagaggagggcgcgggccccacgcgcaccgtggagtggctaaatatgcgcagctggtgctcggggcacctgcacctgcgctgtccgcgccgcctcttttcgcgccgcagccctgccaagctgcatgagctctacgagaaggttttctccaggcgcgcggaccggcacagcgacttctcccgcttggcgagggtgctcacggggaacaccattgcccttgtgctaggcgggggcggggccaggggctgctcgcacatcggagtactaaaggcattagaggaggcgggggtccccgtggacctggtgggcggcacgtccattggctctttcatcggagcgttgtacgcggaggagcgcagcgccagccgcacgaggcagcgggcccgggagtgggccaagagcatgacttcggtgctggaacctgtgttggacctcacgtacccagtcacctccatgttcactgggtctgcctttaaccgcagcatccatcgggtcttccaggataagcagattgaggacctgtggctgccttacttcaacgtgaccacagatatcaccgcctcagccatgcgagtccacaaagatggctccctgtggcggtacgtgcgcgccagcatgacgctgtcgggctacctgcccccgctgtgcgaccccaaggacgggcacctactcatggatggcggctacatcaacaatctgccagcggacatcgcccgcagcatgggtgccaaaacggtcatcgccattgacgtggggagccaggatgagacggacctcagcacctacggggacagcctgtccggctggtggctgctgtggaagcggctgaatccctgggctgacaaggtaaaggttccagacatggctgaaatccagtcccgcctggcctacgtgtcctgtgtgcggcagctagaggttgtcaagtccagctcctactgcgagtacctgcgcccgcccatcgactgcttcaagaccatggactttgggaagttcgaccagatctatgatgtgggctaccagtacgggaaggcggtgtttggaggctggagccgtggcaacgtcattgagaaaatgctcacagaccggcggtctacagaccttaatgagagccgccgtgcagacgtgcttgccttcccaagctctggcttcactgacttggcagagattgtgtcccggattgagccccccacgagctatgtctctgatggctgtgctgacggagaggagtcagattgtctgacagagtatgaggaggacgccggacccgactgctcgagggatgaaggggggtcccccgagggcgcaagccccagcactgcctccgagatggaggaggagaagtcgattctccggcaacgacgctgtctgccccaggagccgcccggctcagccacagatgcctgaggacctcgacaggggtcaccccctccctcccacccctggactgggctgggggtggccccgtgggggtagctcactccccctcctgctgctatgcctgtgacccccgcggcccacacactggactgacctgccctgagcggggatgcagtgttgcactgatgacttgaccagcccctcccccaataaactcgcctcttggaaaaaaaaaaaaaaaaaaaaaaaaaaaaaaaaaaaaaaaaaa

SEQ ID NO: 33 - DNA, 2634 bp, Homo sapiens
acaggcacaggtgaggaactcaactcaaactcctctctctgggaaaacgcggtgcttgctcctcccggagtggccttggcagggtgttggagccctcggtctgccccgtccggtctctggggccaaggctgggtttccctcatgtatggcaagagctctactcgtgcggtgcttcttctccttggcatacagctcacagctctttggcctatagcagctgtggaaatttatacctcccgggtgctggaggctgttaatgggacagatgctcggttaaaatgcactttctccagctttgcccctgtgggtgatgctctaacagtgacctggaattttcgtcctctagacgggggacctgagcagtttgtattctactaccacatagatcccttccaacccatgagtgggcggtttaaggaccgggtgtcttgggatgggaatcctgagcggtacgatgcctccatccttctctggaaactgcagttcgacgacaatgggacatacacctgccaggtgaagaacccacctgatgttgatggggtgataggggagatccggctcagcgtcgtgcacactgtacgcttctctgagatccacttcctggctctggccattggctctgcctgtgcactgatgatcataatagtaattgtagtggtcctcttccagcattaccggaaaaagcgatgggccgaaagagctcataaagtggtggagataaaatcaaaagaagaggaaaggctcaaccaagagaaaaaggtctctgtttatttagaagacacagactaacaattttagatggaagctgagatgatttccaagaacaagaaccctagtatttcttgaagttaatggaaacttttctttggcttttccagttgtgacccgttttccaaccagttctgcagcatattagattctagacaagcaacacccctctggagccagcacagtgctcctccatatcaccagtcatacacagcctcattattaaggtcttatttaatttcagagtgtaaattttttcaagtgctcattaggttttataaacaagaagctacatttttgcccttaagacactacttacagtgttatgacttgtatacacatatattggtatcaaaagggataaaagccaatttgtctgttacatttcctttcacgtatttcttttagcagcacttctgctactaaagttaatgtgtttactctctttccttcccacattctcaattaaaaggtgagctaagcctcctcggtgtttctgattaacagtaaatcctaaattcaaactgttaaatgacatttttatttttatgtctctccttaactatgagacacatcttgttttactgaatttctttcaatattccaggtgatagatttttgttgttttgttaattaatccaagatttacaatagcacaacgctaaatcacacagtaactacaaaaggttacatagatatgaaaagattggcagaggccattgcaggatgaatcacttgtcacttttcttctgtgctgggaaaaataatcaacaatgtgggtctttcatgagcagtgacggatagtttagcttactatgtttcccccccaattcaatgatctataacaacagagcaaagtctatgctcatttgcagactggaatcattaagtaatttaataaaaaaattgtgaaacagcatattacaagtttgaaaattcagggctggtgaaaaaaatcaactctaaatgatgataattttgtacagttttatataaaactctgagaactagaagaaattattaactttttttcttttttaattctaattcacttgtttattttgggggaggaagactttggtatggagcaaagaaataccaaaactactttaaatggaataaaaccaactttattctttttttcccccatactggtagataaagcaaactttataagtgggctattgaaagaaaagttacaagcttaagatacagaagcatttgttcaaaggatagaaagcatctaaaagtttaggctcaagatcaatctttacagattgatattttcagtttttaatcgactggactgcagatgttttttcttttaacaaactggaattttcaaacagattatctgtatttaaatgtatagaccttgatatttttccaatactattttttaaaaaattgtatgatttacatatgaacctcagttctgaaattcattacatatctgtctcattctgccttttatactgtctaaaaaagcaaagttttaaagtgcaattttaaaactgtaaattacatctgaaggctatatatcctttaatcacattttatattttttcttcacaattctaacctttgaaaatattataactggatatttcttcaaacagatgtcctggatgatggtccataagaataatgaagaagtagttaaaaatgtatggacagtttttccggcaaaatttgtagcttatgtcttggctaaatagtcaaggggtaatatgggcctgttgtttagtgtctccttcctaaagagcacttttgtattgtaatttattttttattatgctttaaacactatgtaaataaacctttagtaataaagaattatcagttataaaaaaaaaaaaaaaaaaa

SEQ ID NO: 34 - DNA, 2623 bp, Homo sapiens
gaggaactcaactcaaactcctctctctgggaaaacgcggtgcttgctcctcccggagtggccttggcagggtgttggagccctcggtctgccccgtccggtctctggggccaaggctgggtttccctcatgtatggcaagagctctactcgtgcggtgcttcttctccttggcatacagctcacagctctttggcctatagcagctgtggaaatttatacctcccgggtgctggaggctgttaatgggacagatgctcggttaaaatgcactttctccagctttgcccctgtgggtgatgctctaacagtgacctggaattttcgtcctctagacgggggacctgagcagtttgtattctactaccacatagatcccttccaacccatgagtgggcggtttaaggaccgggtgtcttgggatgggaatcctgagcggtacgatgcctccatccttctctggaaactgcagttcgacgacaatgggacatacacctgccaggtgaagaacccacctgatgttgatggggtgataggggagatccggctcagcgtcgtgcacactgtacgcttctctgagatccacttcctggctctggccattggctctgcctgtgcactgatgatcataatagtaattgtagtggtcctcttccagcattaccggaaaaagcgatgggccgaaagagctcataaagtggtggagataaaatcaaaagaagaggaaaggctcaaccaagagaaaaaggtctctgtttatttagaagacacagactaacaattttagatggaagctgagatgatttccaagaacaagaaccctagtatttcttgaagttaatggaaacttttctttggcttttccagttgtgacccgttttccaaccagttctgcagcatattagattctagacaagcaacacccctctggagccagcacagtgctcctccatatcaccagtcatacacagcctcattattaaggtcttatttaatttcagagtgtaaattttttcaagtgctcattaggttttataaacaagaagctacatttttgcccttaagacactacttacagtgttatgacttgtatacacatatattggtatcaaaagggataaaagccaatttgtctgttacatttcctttcacgtatttcttttagcagcacttctgctactaaagttaatgtgtttactctctttccttcccacattctcaattaaaaggtgagctaagcctcctcggtgtttctgattaacagtaaatcctaaattcaaactgttaaatgacatttttatttttatgtctctccttaactatgagacacatcttgttttactgaatttctttcaatattccaggtgatagatttttgttgttttgttaattaatccaagatttacaatagcacaacgctaaatcacacagtaactacaaaaggttacatagatatgaaaagattggcagaggccattgcaggatgaatcacttgtcacttttcttctgtgctgggaaaaataatcaacaatgtgggtctttcatgagcagtgacggatagtttagcttactatgtttcccccccaattcaatgatctataacaacagagcaaagtctatgctcatttgcagactggaatcattaagtaatttaataaaaaaattgtgaaacagcatattacaagtttgaaaattcagggctggtgaaaaaaatcaactctaaatgatgataattttgtacagttttatataaaactctgagaactagaagaaattattaactttttttcttttttaattctaattcacttgtttattttgggggaggaagactttggtatggagcaaagaaataccaaaactactttaaatggaataaaaccaactttattctttttttcccccatactggtagataaagcaaactttataagtgggctattgaaagaaaagttacaagcttaagatacagaagcatttgttcaaaggatagaaagcatctaaaagtttaggctcaagatcaatctttacagattgatattttcagtttttaatcgactggactgcagatgttttttcttttaacaaactggaattttcaaacagattatctgtatttaaatgtatagaccttgatatttttccaatactattttttaaaaaattgtatgatttacatatgaacctcagttctgaaattcattacatatctgtctcattctgccttttatactgtctaaaaaagcaaagttttaaagtgcaattttaaaactgtaaattacatctgaaggctatatatcctttaatcacattttatattttttcttcacaattctaacctttgaaaatattataactggatatttcttcaaacagatgtcctggatgatggtccataagaataatgaagaagtagttaaaaatgtatggacagtttttccggcaaaatttgtagcttatgtcttggctaaatagtcaaggggtaatatgggcctgttgtttagtgtctccttcctaaagagcacttttgtattgtaatttattttttattatgctttaaacacgtatgtaaataaacctttagtaataaagaattatcagttataaaaaaaaaaaaaaaaaaa

SEQ ID NO: 35 - DNA, 698 bp, Homo sapiens
cggcagccagaagacgcggtcccgcaggtgctgcgccagcgagaggcggtacagcgcctccgcccgcaggctgtgcatctcccgggccaccttctggcagtgcgccagctcacggcgcagctcggccttgcgggcgggcgcggcgctgtgcggcaggtgggcctcgggcggctggggcgcctcggagggcggggccggcacgcctagctgggggcagcccttggcctggaagagctgcagcaccaggtccagcacgcgcccgttgacgcgccaggcgcagttgcccagttgggtgagggcgtccagtgcgccatgcagcgcggtgggcgggcaggtttccagcagctcctggtgctgcgtggcgccttccaccgtgcgcatcagcttggtggggctgagcaggaaggcaccagagtgcggcgatgtccagggcagcggggggcaaagcatgggtacatccaccgcctcgaaggtcagcgtgggctccgcggccttctccagcagctgcacgtaagccgggtgcggcttcatgatgccgatctgctggacgtagcggtacgaatacacgaggtagagcacggtgacaagccgagaggaacgatgcggcttgtccacgctgcatggcatctgcgtagcctgcaccatcatgtacgccagcatcttggtcacatcatcagcactgacagaggccatggctg

SEQ ID NO: 36 - DNA, 510 bp, Homo sapiens
caatataatagtatgttttattaagataaatcactattcttcttgtccatcaacatatactttttacatttttgcttaatttacaattcgagttaatattttgagaacgtaaggaaagacaaataggtaaatgtcttgttgaaagggttaagatactgacaggacataccttcctgttccatcctatataaaatccactcatgagttggatgccaagtatagatttctgaaactcataaccaccaatcacgataatgcaatcattaaaactcacaccattgcaaggaccaagtataaaatattctgctactattttagatacttcaaaaacatccactactttaagtgaaaagctttaaatggggcaatggctattggctttttaatggaaattaaagaagaatttttctattattctgtttcgatcaactattaacctttaggataattgttttatgtgaaaaaaattagaaatttttttaaagcaaaattagtactattggtttttat

SEQ ID NO: 37 - DNA, 4312 bp, Homo sapiens
cgaccgcggcggctggaaccctgattgctgtccttcaacgtgttcattatgaagttattagtaatacttttgttttctggacttataactggttttagaagtgactcttcctctagtttgccacctaagttactactagtatcctttgatggcttcagagctgattatctgaagaactatgaatttcctcatctccagaattttatcaaagaaggtgttttggtagagcatgttaaaaatgtttttatcacaaaaacatttccaaaccactacagtattgtgacaggcttgtatgaagaaagccatggcattgtggctaattccatgtatgatgcagtcacaaagaaacacttttctgactctaatgacaaggatcctttttggtggaatgaggcagtacctatttgggtgaccaatcagcttcaggaaaacagatcaagtgctgctgctatgtggcctggtactgatgtacccattcacgataccatctcttcctattttatgaattacaactcctcagtgtcatttgaggaaagactaaataatattactatgtggctaaacaattcgaacccaccagtcacctttgcaacactatattgggaagaaccagatgcaagtggccacaaatacggacctgaagataaagaaaacatgagcagagtgttgaaaaaaatagatgatcttatcggtgacttagtccaaagactcaagatgttagggctatgggaaaatcttaatgtgatcattacaagtgatcatgggatgacccagtgttctcaggacagactgataaacctggattcctgcatcgatcattcatactacactcttatagatttgagcccagttgctgcaatacttcccaaaataaatagaacagaggtttataacaaactgaaaaactgtagccctcatatgaatgtttatctcaaagaagacattcctaacagattttattaccaacataatgatcgaattcagcccattattttggttgccgatgaaggctggacaattgtgctaaatgaatcatcacaaaaattaggtgaccatggttatgataattctttgcctagtatgcatccatttctagctgcccacggacctgcatttcacaaaggctacaagcatagcacaattaacattgtggatatttatccaatgatgtgccacatcctgggattaaaaccacatcccaataatgggacctttggtcatactaagtgcttgttagttgaccagtggtgcattaatctcccagaagccatcgcgattgttatcggttcactcttggtgttaaccatgctaacatgcctcataataatcatgcagaatagactttctgtacctcgtccattttctcgacttcagctacaagaagatgatgatgatcctttaattgggtgacatgtgctagggcttatacaaagtgtctttgattaatcacaaaactaagaatacatccaaagaatagtgttgtaactatgaaaaagaatactttgaaagacaaagaacttagactaagcatgttaaaattattactttgttttccttgtgttttgtttcggtgcatttgctaataagataacgctgaccatagtaaaattgttagtaaatcattaggtaacatcttgtggtaggaaatcattaggtaacatcaatcctaactagaaatactaaaaatggcttttgagaaaaatacttcctctgcttgtattttgcgatgaagatgtgatacatctttaaatgaaaatataccaaaatttagtaggcatgtttttctaataaatttatatatttgtaaagaaaacaacagaaatctttatgcaatttgtgaattttgtatattagggaggaaaagcttcctatatttttatatttacctttaattagtttgtatctcaagtaccctcttgaggtaggaaatgctctgtgatggtaaataaaattggagcagacagaaaagatatagcaaatgaagaaatattttaaggaaacctatttgaaaaaaaaagcaaagaccatttgataaaagcctgagttgtcaccattatgtcttaagctgttagtcttaaagattattgttaaaaaattcagaagaaaagagagacaagtgctcttctctctatctatgcttaatgcctttatgtaagttacttagttgtttgcgtgtgcctgtgcaagtgtgtttgtgtgtggttgtgtggacattatgtgatttactatataaggaggtcagagatggactgtggccaggcttccacattcctgaagcacacagatctcaggaaaggttatttttgcacttcatatttgtttactttctcctaactcacaagttaaaatcataacttaatttcattaacttttatcatttaactctctcatgtttgttgtaacctgaggtatccaaatgctacagaaaaatttatgacccaaatacaaatctcaatttgactgggacagaatgaggaatggagatttttgtatttatctttgggactttatgccttactttttaggctatagaatagttaagaaattttaaacaaaatttagtatcttttggtctttcacaccattcatatgttaagtggcagaatagccttagtgctacctccactttttttctccagtatttgcatcacagaaataatccctctgtttaacatgtttgttcagagccaagggtttattgtgaagaactgtcatcctgcctttgctagctggtaccttctagtaatcaaaattaatatgaagaaactaggttgtgacagactagattatatttagtaggggaaaaattgggctcaagaaccattcatcagtacgtgagacaagcagttaatagtatgatctttaaagttttgacaatataaaataaacttggtaactgttttacaaatataaaagtataataaatatgcagcccagttaaatattgattatctgtgatggtaaagaacaacagtggtgccagtcatcaaacatacagtgcgtcctattgagtcactgctaatttcttgagcctggtatttgctgcctattgtatttgtggttgttgagaggcattttcaaaccctgtataaataatccatgctgttggtcataagttaactgtattaagaacagtaaaataaataaaaaccaatagtactaattttgctttaaaaaaatttctaatttttttcacataaaacaattatcctaaaggttaatagttgatcgaaacagaataatagaaaaattctactttaatttccattaaaaagcaaatagcattgacacatttaaagcttttcatttaaagtagtggatgtttttgaagtatctaaaatagtagcagaatattttatacttggtccttgcaatggtgtgagttttaatgattgcattatcgtgattggtggttatgagtttcagaaatctatacttggcatccaactcatgagtggattttatataggatggaacaggaaggtatgtcctgtcagtatcttaaccctttcaacaagacatttacctatttgtctttccttacgttctcaaaatattaactcgaattgtaaattaagcaaaaatttaaaaagtatatgttgatgggacaagaagaatagtatttatttaataaaacatatattatattgaactatgtgttaattcatttgtatcttttaaaaaattatcactgttaaagccattgactcctttagtacactgagaaaaatcttatagtaaaactagcctttcacattaaggttttggtgtgtattttgttaaataactaacatgctgctctattttctgggtgtagaaagtatttggctctaggaaacatttacttgtttgtgaaaacaataccccaaggtaataggaaaagtttgagttaagtgtttttaattcagtcagtgaattcagaataagtacattcatgtataacatagggacagttctgctgctgttatttatatgcaattcttctggtaaatagcaatagaataaaacatatttcaatgtttgtgtataggttttatattattattccactaggaatggcataagaatttatagataaattcttgtaacattaaaggattaaaatgtttttacattgtttttgggtgtctccttcttgtgcccatatctgataagctttatggattattgcatttaattccttttatttggagggttttacttccttgttaacatataaagttataaatgaaggacaaggaggagatggaaaatgtgtatttattgttaattcttaaaatagtgtgtaaataaaataacatcagtgtgcttt

SEQ ID NO: 38 - DNA, 4508 bp, Homo sapiens
cgggcagcgtggaccccggatgagttgcttttaggcttgctggcccgcggggctgtccaggcacgcgaggcccctcaggtacgccctctcttccctgcaggatccggccctcaaagacgagggtcacgcacgcgttacaaccccgaaacagtagcacaagatttaatttttaaaagagcgtgtttcttcggggcttgccgttcgttcgtttccagcctcaggaatttatggtcgcctttttgaatgagcaacaaaatgcttcaacaagttccagaaaacataaattttcctgctgaagaagagaaaatcttggagttttggactgaatttaattgttttcaggaatgcttaaagcaatcaaaacataaaccaaaatttaccttctatgatggtcctccttttgcaactggactgcctcactatggacatatacttgcgggtacaattaaagatatagttacaagatatgctcaccagagtgggtttcatgttgacagaagatttggatgggattgccatggcttacctgtggaatatgaaattgataagacactgggaatcagaggaccagaggatgtggccaaaatggggattacagagtataacaatcagtgccgagcaattgtgatgagatattctgctgagtggaagtctactgttagcagacttggccgatggattgactttgacaatgactataaaactctgtatccacaattcatggaatcagtctggtgggtcttcaaacaactctatgataaaggccttgtttatagaggtgtgaaagtcatgcccttctctacggcatgtaacactccactttccaacttcgagtcacaccagaattataaggatgttcaagatccttcagtatttgtaactttccctttggaagaagatgaaactgtatctttagttgcttggacaaccactccctggactctacctagtaaccttgctgtgtgtgttaatccagaaatgcaatatgtgaaaattaaagatgttgccagaggacgattactcattttaatggaagccagattgtcagccctctataaattggagagtgactatgagatccttgaaagatttcctggtgcctatcttaaaggcaagaagtacaggcccctgtttgactatttcctgaagtgtaaagagaatggcgctttcactgtgcttgttgacaactatgtgaaggaagaagaaggcacaggggttgtccaccaagctccttacttcggtgctgaggactatcgggtctgtatggactttaacattattcggaaagactcactccctgtttgccctgtggatgcttcaggctgcttcacaacggaggtgacagatttcgcaggacagtatgtgaaggatgctgacaaaagtatcatcaggactttgaaggaacaaggccgacttctggttgccaccaccttcactcacagctaccctttttgctggagatcagacactcctctaatttacaaagcagtgcccagctggtttgtgcgagtggagaacatggtggaccagctcctaaggaacaatgacctgtgctactgggtcccagagttggtacgagaaaaacgatttggaaattggctgaaagatgcacgtgactggacaatttccagaaacagatactggggcacccccatcccactgtgggtcagcgatgactttgaggaggtggtatgcattgggtcagtggcggaacttgaagaactgtcaggagcaaagatctcagatctccacagagagagtgttgaccacctgaccattccttcacgctgtgggaagggatccttgcaccgcatctctgaagtgtttgactgttggtttgagagtggcagcatgccctatgctcaggttcattacccgtttgaaaacaagagggagtttgaggatgcttttcctgcagatttcattgccgagggcatcgaccaaaccagaggatggttttataccctgctggtgctggccacggccctctttggacaaccgcctttcaagaacgtaattgtgaatgggcttgtcctggcaagtgatggccaaaaaatgagcaaacggaaaaagaattatccagatccagtttccatcatccagaagtatggtgctgatgccctcagattatatctgattaactcccctgtggtgagagcagaaaacctccgctttaaagaagagggtgtgcgggacgtccttaaggatgtactgctcccatggtacaatgcctatcgcttcttaatccagaacgttctgaggctccagaaggaggaagaaatagaatttctctacaatgagaacacggttagagaaagccccaacattacagaccggtggatcctgtccttcatgcagtctctcattggcttctttgagactgaaatggcagcttataggctttatactgtggtgcctcgcctggtcaagtttgtagatattctgaccaattggtatgttagaatgaaccgcagaagattaaagggtgaaaatgggatggaggattgtgtcatggccctagaaaccttgtttagtgttctgctttctctttgcagacttatagctccctacacaccttttctcactgaattgatgtaccagaatctaaaggtgctgattgaccctgtttctgttcaggacaaggacacactcagcattcactacctcatgctgccccgtgttcgagaagaattgattgacaagaaaacagagagtgcagtatctcagatgcagtctgtgattgaacttggaagagtgatcagagaccgaaaaactattcccataaagtatcctttgaaagaaattgtggttatccatcaagatccagaagctcttaaagatatcaagtctttggagaagtatatcattgaggaactcaatgttcgaaaagttacactgtctacagataaaaacaagtatggcattcggctaagggcagaaccagatcacatggtcctggggaagcgtctgaagggagcctttaaggcagtgatgacgtccatcaagcagttgagcagtgaggagctggagcagttccagaagactgggaccattgttgtggaaggccatgaattgcacgatgaagacatccgcctcatgtacacctttgatcaggccacaggtgggactgcgcaatttgaagcacactcagatgctcaggctttggtcctcttagatgtcactcctgaccagtcaatggtagatgaaggaatggctcgggaagtcatcaatcgcatacagaaacttcgcaaaaagtgcaatctggttccaactgatgaaatcacagtgtactataaagcaaagtctgaaggaacatatctgaatagtgttattgaaagccacacagagttcatatttaccaccataaaggctcccttgaaaccatatccagtttctccatcggataaagtccttattcaagaaaaaacacagttgaagggatctgaactggaaattacactcaccagaggatcttcccttcctggtcctgcttgtgcatatgtcaatcttaacatttgtgcaaatggcagtgaacaaggtggagtattgctcctggaaaatccaaaaggtgacaataggttggaccttttaaagctgaagagtgttgtcactagcatttttggtgtgaaaaatacagagctggctgtcttccatgatgaaacagaaatacaaaaccaaactgacttactgagtcttagtggaaaaacactttgtgtgactgcaggatcggctccctctctgatcaacagttctagtactcttctttgtcagtatatcaacctacagctcctgaatgcaaagccacaagagtgtttaatggggacagtgggcactctcctgcttgaaaacccacttgggcagaatggactcacccaccaaggtcttctgtatgaagcagccaaggtgtttggccttcggagcaggaagctaaagctgtttctgaatgagacccaaacgcaggaaattacagaagacatccccgtgaagactttgaatatgaagactgtgtatgtttctgtgttaccaacaacagcagacttctagcatgtacttatcaatgttgttcggtcagcccttccctaattacacctatcccctacacatacatgcacatagacacacacatgaacacactgaagatatttccttcaggtgtgtgtaaaatatgctgcttggattgaaattcaaatgggattgattagtcaagtaacttgagacctcacagtaatcttcacacttaaccttagacacctatgcagtcatgttgggagcaggttacaatgttacttcagcccacagtttatttctattcttgagttcttaagtacagaagatagaagtgatttaaatggcatagtatatatatcattttctggccttttaaaatttatttgagacctcttgatgaaatggacatattatatatttctgccacctggattttcctggataatttgatggaatattttaagtttcagtaaatcagaacaataaacaaactcagatat

SEQ ID NO: 39 - DNA, 2195 bp, Homo sapiens
actctttcttcggctcgcgagctgagaggagcaggtagaggggcagaggcgggactgtcgtctgggggagccgcccaggaggctcctcaggccgaccccagaccctggctggccaggatgaagtatctccggcaccggcggcccaatgccaccctcattctggccatcggcgctttcaccctcctcctcttcagtctgctagtgtcaccacccacctgcaaggtccaggagcagccaccggcgatccccgaggccctggcctggcccactccacccacccgcccagccccggccccgtgccatgccaacacctctatggtcacccacccggacttcgccacgcagccgcagcacgttcagaacttcctcctgtacagacactgccgccactttcccctgctgcaggacgtgcccccctctaagtgcgcgcagccggtcttcctgctgctggtgatcaagtcctcccctagcaactatgtgcgccgcgagctgctgcggcgcacgtggggccgcgagcgcaaggtacggggtttgcagctgcgcctcctcttcctggtgggcacagcctccaacccgcacgaggcccgcaaggtcaaccggctgctggagctggaggcacagactcacggagacatcctgcagtgggacttccacgactccttcttcaacctcacgctcaagcaggtcctgttcttacagtggcaggagacaaggtgcgccaacgccagcttcgtgctcaacggggatgatgacgtctttgcacacacagacaacatggtcttctacctgcaggaccatgaccctggccgccacctcttcgtggggcaactgatccaaaacgtgggccccatccgggctttttggagcaagtactatgtgccagaggtggtgactcagaatgagcggtacccaccctattgtgggggtggtggcttcttgctgtcccgcttcacggccgctgccctgcgccgtgctgcccatgtcttggacatcttccccattgatgatgtcttcctgggtatgtgtctggagcttgagggactgaagcctgcctcccacagcggcatccgcacgtctggcgtgcgggctccatcgcaacacctgtcctcctttgacccctgcttctaccgagacctgctgctggtgcaccgcttcctaccttatgagatgctgctcatgtgggatgcgctgaaccagcccaacctcacctgcggcaatcagacacagatctactgagtcagcatcagggtccccagcctctgggctcctgtttccataggaaggggcgacaccttcctcccaggaagctgagacctttgtggtctgagcataagggagtgccagggaaggtttgaggtttgatgagtgaatattctggctggcgaactcctacacatccttcaaaacccacctggtactgttccagcatcttccctggatggctggaggaactccagaaaatatccatcttctttttgtggctgctaatggcagaagtgcctgtgctagagttccaactgtggatgcatccgtcccgtttgagtcaaagtcttacttccctgctctcacctactcacagacgggatgctaagcagtgcacctgcagtggtttaatggcagataagctccgtctgcagttccaggccagccagaaactcctgtgtccacatagagctgacgtgagaaatatctttcagcccaggagagaggggtcctgatcttaaccctttcctgggtctcagacaactcagaaggttggggggataccagagaggtggtggaataggaccgccccctccttacttgtgggatcaaatgctgtaatggtggaggtgtgggcagaggagggaggcaagtgtcctttgaaagttgtgagagctcagagtttctggggtcctcattaggagcccccatccctgtgttccccaagaattcagagaacagcactggggctggaatgatctttaatgggcccaaggccaacaggcatatgcctcactactgcctggagaagggagagattcaggtcctccagcagcctccctcacccagtatgttttacagattacggggggaccgggtgagccagtgaccccctgcagcccccagcttcaggcctcagtgtctgccagtcaagcttcacaggcattgtgatggggcagccttggggaatataaaattttgtgaagacttgg

SEQ ID NO: 40 - DNA, 1219 bp, Homo sapiens
gaatagtctaccccccttgcactctacctgacacagctgcagcctgcaattcactcgcactgcctgggattgcactggatccgtgtgctcagaacaaggtgaacgcccagctgcagccatgaagatctgtagcctcaccctgctctccttcctcctactggctgctcaggtgctcctggtggaggggaaaaaaaaagtgaagaatggacttcacagcaaagtggtctcagaacaaaaggacactctgggcaacacccagattaagcagaaaagcaggcccgggaacaaaggcaagtttgtcaccaaagaccaagccaactgcagatgggctgctactgagcaggaggagggcatctctctcaaggttgagtgcactcaattggaccatgaattttcctgtgtctttgctggcaatccaacctcatgcctaaagctcaaggatgagagagtctattggaaacaagttgcccggaatctgcgctcacagaaagacatctgtagatattccaagacagctgtgaaaaccagagtgtgcagaaaggattttccagaatccagtcttaagctagtcagctccactctatttgggaacacaaagcccaggaaggagaaaacagagatgtcccccagggagcacatcaaaggcaaagagaccaccccctctagcctagcagtgacccagaccatggccaccaaagctcccgagtgtgtggaggacccagatatggcaaaccagaggaagactgccctggagttctgtggagagacttggagctctctctgcacattcttcctcagcatagtgcaggacacgtcatgctaatgaggtcaaaagagaacgggttcccttaagagatgtcatgtcgtaagtccctctgtatactttaaagctctctacagtccccccaaaatatgaacttttgtgcttagtgagtgcaacgaaatatttaaacaagttttgtattttttgcttttgtgttttggaatttgccttatttttcttggatgcgatgttcagaggctgtttcctgcagcatgtatttccatggcccacacagctatgtgtttgagcagcgaagagtctttgagctgaatgagccagagtgataatttcagtgcaacgaactttctgctgaattaatggtaataaaactctgggtgtttttcagaaatacattcaaaaaaaaaaaaaaaaaaaaaaaaaaaaaaaaaaaaaaaa

SEQ ID NO: 41 - DNA, 1876 bp, Homo sapiens
gagccatgctcgcggcgatgggctctctggcggctgccctctgggcagtggtccatcctcggactctcctactgggcactgtcgcctttctgctcgctgctgactttctcaaaagacggcgcccaaagaactacccgccggggccctggcgcctgcccttccttggcaacttcttccttgtggacttcgagcagtcgcacctggaggttcagctgtttgtgaagaaatatgggaacctttttagcttggagcttggtgacatatctgcagttcttattactggcttgcccttaatcaaagaagcccttatccacatggaccaaaactttgggaaccgccccgtgacccctatgcgagaacatatctttaagaaaaatggattgattatgtcaagtggccaggcatggaaggagcaaagaaggttcactctgacagcactaaggaactttggtttaggaaagaagagcttagaggaacgcattcaggaggaggcccaacacctcactgaagcaataaaagaggagaacggacagccttttgaccctcatttcaagatcaacaatgcagtttccaatatcatttgctccatcaccttcggagaacgctttgagtaccaggatagttggtttcagcagctgctgaagttactagatgaagtcacatacttggaggcttcaaagacatgccagctctacaatgtctttccatggataatgaaattcctgcctggaccccaccaaactctcttcagcaactggaaaaaactgaaattgtttgtttctcatatgattgacaaacacagaaaggattggaatcctgcagaaacaagagactttattgatgcttaccttaaagaaatgtcaaagcacacaggcaatcctacttcaagtttccatgaagaaaacctcatctgcagcaccctggacctcttctttgccggaaccgagacaacttccacaactctgcgatgggctctgctttatatggccctctacccagaaatccaagaaaaagtacaagctgagattgacagagtgattggccaggggcagcagccgagcacagccgcccgggagtccatgccctacaccaatgctgtcatccatgaggtgcagagaatgggcaacatcatccccctgaacgttcccagggaagtgacagttgataccactttggctgggtaccacctgcccaagggtaccatgatcctgaccaatttgacggcgctgcacagggaccccacagagtgggccacccctgacacattcaatccggaccattttctggagaatggacagtttaagaaaagggaagcctttatgcctttctcaataggaaagcgggcatgcctcggagaacagttggccaggactgagctgtttattttcttcacttcccttatgcaaaaatttaccttcaggcccccaaacaatgagaagctgagcctgaagtttagaatgggtatcaccatttccccagtcagtcaccgcctctgcgctgttcctcaggtgtaatattgttaagaaagaaaggggcaaggaaagtaagaagacatggcacgtgttctgaaaccactggtgtctgctcagatgtgttgggacaaaatgaaagtgactttcaagaaagatcagaggaatttgactcagagaaaactagatccaaatcccagctctactgtctcgtccgaattagccttgggaaaatcatttatatgctaaataatttacctttttatctaggagatgaaaagaggataatgtttccttccataaagaaagttcttgtaagaatcaaaagaaatggtgagctttaagtggtttgtaaaccataaaacacatcataaaagttctatctataaaaaaaaaaaaaaaaaaaa

SEQ ID NO: 42 - DNA, 4541 bp, Homo sapiens
ggatcctctagggtcccagctcgcctcgatggagctcctcccgccgctgcctcagtccttcctgttgctgctgctgttgcctgccaagcccgcggcgggcgaggactggcagtgcccgcgcaccccctacgcggcctctcgcgactttgacgtgaagtacgtggtgcccagcttctccgccggaggcctggtacaggccatggtgacctacgagggcgacagaaatgagagtgctgtgtttgtagccatacgcaatcgcctgcatgtgcttgggcctgacctgaagtctgtccagagcctggccacgggccctgctggagaccctggctgccagacgtgtgcagcctgtggcccaggaccccacggccctcccggtgacacagacacaaaggtgctggtgctggatcccgcgctgcctgcgctggtcagttgtggctccagcctgcagggccgctgcttcctgcatgacctagagccccaagggacagccgtgcatctggcagcgccagcctgcctcttctcagcccaccataaccggcccgatgactgccccgactgtgtggccagcccattgggcacccgtgtaactgtggttgagcaaggccaggcctcctatttctacgtggcatcctcactggacgcagccgtggctggcagcttcagcccacgctcagtgtctatcaggcgtctcaaggctgacgcctcgggattcgcaccgggctttgtggcgttgtcagtgctgcccaagcatcttgtctcctacagtattgaatacgtgcacagcttccacacgggagccttcgtatacttcctgactgtacagccggccagcgtgacagatgatcctagtgccctgcacacacgcctggcacggcttagcgccactgagccagagttgggtgactatcgggagctggtcctcgactgcagatttgctccaaaacgcaggcgccggggggccccagaaggcggacagccctaccctgtgctgcaggtggcccactccgctccagtgggtgcccaacttgccactgagctgagcatcgccgagggccaggaagtactatttggggtctttgtgactggcaaggatggtggtcctggcgtgggccccaactctgtcgtctgtgccttccccattgacctgctggacacactaattgatgagggtgtggagcgctgttgtgaatccccagtccatccaggcctccggcgaggcctcgacttcttccagtcgcccagtttttgccccaacccgcctggcctggaagccctcagccccaacaccagctgccgccacttccctctgctggtcagtagcagcttctcacgtgtggacctattcaatgggctgttgggaccagtacaggtcactgcattgtatgtgacacgccttgacaacgtcacagtggcacacatgggcacaatggatgggcgtatcctgcaggtggagctggtcaggtcactaaactacttgctgtatgtgtccaacttctcactgggtgacagtgggcagcccgtgcagcgggatgtcagtcgtcttggggaccacctactctttgcctctggggaccaggttttccaggtacctatccgaggccctggctgccgccacttcctgacctgtgggcgttgcctaagggcatggcatttcatgggctgtggctggtgtgggaacatgtgcggccagcagaaggagtgtcctggctcctggcaacaggaccactgcccacctaagcttactgagttccacccccacagtggacctctaaggggcagtacaaggctgaccctgtgtggctccaacttctaccttcacccttctggtctggtgcctgagggaacccatcaggtcactgtgggccaaagtccctgccggccactgcccaaggacagctcaaaactcagaccagtgccccggaaagactttgtagaggagtttgagtgtgaactggagcccttgggcacccaggcagtggggcctaccaacgtcagcctcaccgtgactaacatgccaccgggcaagcacttccgggtagacggcacctccgtgctgagaggcttctctttcatggagccagtgctgatagcagtgcaacccctctttggcccacgggcaggaggcacctgtctcactcttgaaggccagagtctgtctgtaggcaccagccgggctgtgctggtcaatgggactgagtgtctgctagcacgggtcagtgaggggcagcttttatgtgccacaccccctggggccacggtggccagtgtcccccttagcctgcaggtggggggtgcccaggtacctggttcctggaccttccagtacagagaagaccctgtcgtgctaagcatcagccccaactgtggctacatcaactcccacatcaccatctgtggccagcatctaacttcagcatggcacttagtgctgtcattccatgacgggcttagggcagtggaaagcaggtgtgagaggcagcttccagagcagcagctgtgccgccttcctgaatatgtggtccgagacccccagggatgggtggcagggaatctgagtgcccgaggggatggagctgctggctttacactgcctggctttcgcttcctacccccaccccatccacccagtgccaacctagttccactgaagcctgaggagcatgccattaagtttgagtatattgggctgggcgctgtggctgactgtgtgggtatcaacgtgaccgtgggtggtgagagctgccagcacgagttccggggggacatggttgtctgccccctgcccccatccctgcagcttggccaggatggtgccccattgcaggtctgcgtagatggtgaatgtcatatcctgggtagagtggtgcggccagggccagatggggtcccacagagcacgctccttggtatcctgctgcctttgctgctgcttgtggctgcactggcgactgcactggtcttcagctactggtggcggaggaagcagctagttcttcctcccaacctgaatgacctggcatccctggaccagactgctggagccacacccctgcctattctgtactcgggctctgactacagaagtggccttgcactccctgccattgatggtctggattccaccacttgtgtccatggagcatccttctccgatagtgaagatgaatcctgtgtgccactgctgcggaaagagtccatccagctaagggacctggactctgcgctcttggctgaggtcaaggatgtgctgattccccatgagcgggtggtcacccacagtgaccgagtcattggcaaaggccactttggagttgtctaccacggagaatacatagaccaggcccagaatcgaatccaatgtgccatcaagtcactaagtcgcatcacagagatgcagcaggtggaggccttcctgcgagaggggctgctcatgcgtggcctgaaccacccgaatgtgctggctctcattggtatcatgttgccacctgagggcctgccccatgtgctgctgccctatatgtgccacggtgacctgctccagttcatccgctcacctcagcggaaccccaccgtgaaggacctcatcagctttggcctgcaggtagcccgcggcatggagtacctggcagagcagaagtttgtgcacagggacctggctgcgcggaactgcatgctggacgagtcattcacagtcaaggtggctgactttggtttggcccgcgacatcctggacagggagtactatagtgttcaacagcatcgccacgctcgcctacctgtgaagtggatggcgctggagagcctgcagacctatagatttaccaccaagtctgatgtgtggtcatttggtgtgctgctgtgggaactgctgacacggggtgccccaccataccgccacattgacccttttgaccttacccacttcctggcccagggtcggcgcctgccccagcctgagtattgccctgattctctgtaccaagtgatgcagcaatgctgggaggcagacccagcagtgcgacccaccttcagagtactagtgggggaggtggagcagatagtgtctgcactgcttggggaccattatgtgcagctgccagcaacctacatgaacttgggccccagcacctcgcatgagatgaatgtgcgtccagaacagccgcagttctcacccatgccagggaatgtacgccggccccggccactctcagagcctcctcggcccacttgacttagttcttgggctggacctgcttagctgccttgagctaaccccaaggctgcctctgggccatgccaggccagagcagtggccctccaccttgttcctgccctttaactttcagaggcaataggtaaatgggcccattaggtccctcactccacagagtgagccagtgagggcagtcctgcaacatgtatttatggagtgcctgctgtggaccctgtcttctgggcacagtggactcagcagtgaccacaccaacactgacccttgaaccaataaaggaacaaatgactattaaagcacaaaaaaaaaa

SEQ ID NO: 43 - DNA, 720 bp, Homo sapiens
ggttcctgtgtgaccctgggcagttccttacctccctggtccccgtttgtcaaagaggatggactaaatgatctctgaaagtgttgaagcgcggacccttctgggtccaggaggggtccctgcaaaactccaggcaggacttctcaccagcagtcgtggggaacggaggaggacatggggaggttgtggggcctcaggctccgggcaccagggccaacctcaggctcctaaagagacattttccgcccactcctgggacactccgtctgctccaatgactgagcagcatccaccccaccccatctttgctgccagctctcaggaccgtgccctcgtcagctgggatgtgaagtctctgggtggaagtgtgtgccaagagctactcccacagcagccccaggagaaggggctttgtgaccagaaagcttcatccacagccttgcagcggctcctgcaaaaggaggtgaaagtccctgcctcaggccaagggaccaggtttgcaggagcccccctagtggtatggggctgagccctcctgagggccggttctaaggctcagactgggcactgggcctcagcctgctttcctgcagagtcgccaagcagacagccctggaaatgcctgactcagtgaacagtgcctgtgagcattgggggccaggaacggtctggtatacatggtgactcagcatcacccactttaagaaagaaaaaaacggc

SEQ ID NO: 44 - DNA, 1167 bp, Homo sapiens
ctggaaaatatgaggggccacccctctctgctgctgctatatatggcattaaccacctgcctggatacttcacccagtgaggagacagaccaagaagtcttcctgggtcccccagaggcccagagcttcctgagtagccatacccggattccaagagccaaccactgggacctggagctgctcacaccagggaacctggaacgggagtgtctggaagagaggtgttcctgggaagaggccagggagtattttgaggacaacactctcacggagcgcttttgggagagctacatctacaatggcaaaggagggcgtggacgagtggatgtggccagcctggctgtggggctgacaggtggcatcctgctcattgtcctggccggcctgggagccttttggtatctgcgctggcgacagcaccgaggccagcagccctgtccccaagaggccgggctcattagccctctgagtcctttgaaccctctgggcccaccgacgcccctgcctccacccccacccccacccccaggcctccccacctatgagcaggcgctggcagcctctggggtacacgacgcacctccacccccctacaccagcctcaggaggcctcactgaagagctgctttcgagacccggctctccgaaccgtgcccctgattcataccggattccggaagccgctaggcctcatagacgccgaagctggacttggagtggggaatggtgggagtaggggtcatccggcccgaggctgccctggcacacgcgtttccgccgcgtatggatatacacatgttttcggcaacgtgttcccgtgtcctggcccctcacgggcccccacactctcctgaccgtgagggcactggtcagttccgcccccgtggtaggcagacgcgcggggaaattcggacccaggagcccagccccggctgtgccatcttgtgtatgggcagatatgacctgacagccccctccagtgccacagggtacgcacacgcagagccccgcctgtgcacacgcgtgtcttcgtgcactccccgtgcggtacaggggcacttcgtaacccagggaaagggcggggggcatatttgcaagcgcgctcggtgcgggcaggctcgcattgcacccagggagctggagttgagctgttcccctaaataaaaa

SEQ ID NO: 45 - DNA, 2374 bp, Homo sapiens
acctggtgcgggaggcccgggcagggagaagtgtgcggggccgggacaagccggctccgagtgcggggcgggaggggcctgcgcggcggcgggagcccagagccgcgctaaagcgggtcaagcgtcctccttttctccccgccccttctcctcctcctacctgggcctctgcgtggagacgcgcacctggcaaccggaggccgcgtctccgccttctctgctcgcgcctggcgcccggagcctgcccgggacctccgccggagccgcgctcgctgcaggcggcctcgagcgctctctcgttgatgccgttttggaggtgaccggcgcggcggccgctctatggtggggccgcgttagtggctgcggctccgcgggactccagggcgcggctgcgaggtggcggggcgccccgcctgcagaaccctgcttgcagctcaggtttcggggtgcttgaggaggccgccacggcagcgcgggagcggaagatgttggagctgaggcaccggggaagctgccccggccccagggaagcggtgtcgccgccacaccgcgagggagaggcggccggcggcgaccacgaaaccgagagcaccagcgacaaagaaacagatattgatgacagatatggagatttggattccagaacagattctgatattccggaaattccaccatcctcagatagaacccctgagattctcaaaaaagctctatctggtttatcttcaaggtggaaaaactggtggatacgtggaattctcactctaactatgatctcgttgtttttcctgatcatctatatgggatccttcatgctgatgcttcttgttctgggcatccaagtgaaatgcttccatgaaattatcactataggttatagagtctatcattcttatgatctaccatggtttagaacactaagttggtactttctattgtgtgtaaactactttttctatggagagactgtagctgattattttgctacatttgttcaaagagaagaacaacttcagttcctcattcgctaccatagatttatatcatttgccctctatctggcaggtttctgcatgtttgtactgagtttggtgaagaaacattatcgtctgcagttttatatgttcgcatggactcatgtcactttactgataactgtcactcagtcacaccttgtcatccaaaatctgtttgaaggcatgatatggttccttgttccaatatcaagtgttatctgcaatgacataactgcttacctttttggatttttttttgggagaactccattaattaagttgtctcctaaaaagacttgggaaggattcattggtggtttcttttccacagttgtgtttggattcattgctgcctatgtgttatccaaataccagtactttgtctgcccagtggaataccgaagtgatgtaaactccttcgtgacagaatgtgagccctcagaacttttccagcttcagacttactcacttccaccctttctaaaggcagtcttgagacaggaaagagtgagcttgtaccctttccagatccacagcattgcactgtcaacctttgcatctttaattggcccatttggaggcttctttgctagtggattcaaaagagccttcaaaatcaaggattttgcaaataccattcctggacatggtgggataatggacagatttgattgtcagtatttgatggcaacttttgtacatgtgtacatcacaagttttatccggggcccaaatcccagcaaagtgctacagcagttgttggtgcttcaacctgaacagcagttaaatatatataaaaccctgaagactcatctcattgagaaaggaatcctacaacccaccttgaaggtataactggatccagagagggaaggactgacaagaaggaattattcagaaaaacactgacagatgttttataaattgtacagaaaaatagttaaaaatgcaataggttgaagttttggagatatgtttctctctgaaattactgtgaatatttaacaaacacttacttgatctatgttatgaaataagtagcaaattgccagcaaaatgtcttgtaccttttctaaagtgtattttctgatgtgaacttccttccccttacttgctaggtttcataatttaaaagagtcaaacactataaaatgagtaagttgacgatgttttaagattgcacctggcagtgtgcctttttgcacaaatatttacttttgcacttggagctgcttttaattttagcaaaatgttttatgcaaggcacaataggaagtcagttctcctgcacttcctcctcatgtagtctggagtactttctaaagggcttagttggatttaaaaaaaaaaaaaaaaaa

SEQ ID NO: 46 - DNA, 963 bp, Homo sapiens
gacacgaagcctcccgggtggcttacagacgctgccagcatcgccgccgccagaggagaaatgtctgaagtaagacccctctccagagacatcttgatggagaccctcctgtatgagcagctcctggaacccccgaccatggaggttcttggcatgactgactctgaagaggacctggaccctatggaggacttcgattctttggaatgcatggagggcagtgacgcattggccctgcggctggcctgcatcggggacgagatggacgtgagcctcagggccccgcgcctggcccagctctccgaggtggccatgcacagcctgggtctggctttcatctacgaccagactgaggacatcagggatgttcttagaagtttcatggacggtttcaccacacttaaggagaacataatgaggttctggagatccccgaaccccgggtcctgggtgtcctgcgaacaggtgctgctggcgctgctgctgctgctggcgctgctgctgccgctgctcagcgggggcctgcacctgctgctcaagtgaggccccggcggctcagggcggggctggccccacccccatgaccactgccctggaggtggcggcctgctgctgttatctttttaactgttttctcatgatgcctttttatatttaaaccccgagatagtgctggaacactgctgaggttttatactcaggttttttgttttttttttattccagttttcgttttttctaaaagatgaattcctatggctctgcaattgtcaccggttaactgtggcctgtgcccaggaagagccattcactcctgcccctgcccacacggcaggtagcagggggagtgctggtcacacccctgtgtgatatgtgatgccctcggcaaagaatctactggaatagattccgaggagcaggagtgctcaataaaatgttggtttccagcaaaaaaaaaaaaaa

SEQ ID NO: 47 - DNA, 1408 bp, Homo sapiens
ctctcgagcctgctgcctgctcccccgccccaccagccatggtggtttctggagcgcccccagccctgggtgggggctgtctcggcaccttcacctccctgctgctgctggcgtcgacagccatcctcaatgcggccaggatacctgttcccccagcctgtgggaagccccagcagctgaaccgggttgtgggcggcgaggacagcactgacagcgagtggccctggatcgtgagcatccagaagaatgggacccaccactgcgcaggttctctgctcaccagccgctgggtgatcactgctgcccactgtttcaaggacaacctgaacaaaccatacctgttctctgtgctgctgggggcctggcagctggggaaccctggctctcggtcccagaaggtgggtgttgcctgggtggagccccaccctgtgtattcctggaaggaaggtgcctgtgcagacattgccctggtgcgtctcgagcgctccatacagttctcagagcgggtcctgcccatctgcctacctgatgcctctatccacctccctccaaacacccactgctggatctcaggctgggggagcatccaagatggagttcccttgccccaccctcagaccctgcagaagctgaaggttcctatcatcgactcggaagtctgcagccatctgtactggcggggagcaggacagggacccatcactgaggacatgctgtgtgccggctacttggagggggagcgggatgcttgtctgggcgactccgggggccccctcatgtgccaggtggacggcgcctggctgctggccggcatcatcagctggggcgagggctgtgccgagcgcaacaggcccggggtctacatcagcctctctgcgcaccgctcctgggtggagaagatcgtgcaaggggtgcagctccgcgggcgcgctcaggggggtggggccctcagggcaccgagccagggctctggggccgccgcgcgctcctagggcgcagcgggacgcggggctcggatctgaaaggcggccagatccacatctggatctggatctgcggcggcctcgggcggtttcccccgccgtaaataggctcatctacctctacctctgggggcccggacggctgctgcggaaaggaaaccccctccccgacccgcccgacggcctcaggccccgcctccaaggcatcaggccccgcccaacggcctcatgtccccgcccccacgacttccggccccgccccgggccccagcgcttttgtgtatataaatgttaatgatttttataggtatttgtaaccctgcccacatatcttatttattcctccaatttcaataaattatttattctccaaaaaaaaaaaaaaaaaaaaaaaaaataaaaaaaaaaacaaaaaaaaaaaaaaa

SEQ ID NO: 48 - DNA, 3600 bp, Homo sapiens
gaatcaacagaatttgtctttttgtgactggtttatttcacttaacttcatcctcaaggttcaacttaaaggtgtatccatgttgtagcacgtgtcagcattttctttcgttctcaggctaaatagtatttcattgtgtgtgtacaccatgtttcatgcattcattcatcccttgaaagattggtgggttgtttcctcctttttgcttttgtgaacagtgctacgaacatggttgtacaaacatctcttggagccccactagcagttcctttgggtatataccccaaagtggaattgctggatctggtagctccctttttaattttttgaggaatcgccacacagtttccataacagctgcaccattttacattcccaagaccttttttttttttttttttttaagaagaaaagatgtgtttctgcatttctggaagtctatgctgcatttccatttgttgaaatttaagaccagagtcatcttttctgctgtaattataatggtcactggcttgtgccttttcctcctctctctgccccatctgcacggggtctttgaacaagtcccagcaccttggtggacaagcctgtgtccctggcccatcatggaagccgctgcctttcagagtgggagtctgtaccctgttgcctcattccttgctgcgcccatgagtgagcttgtgcctgacctctccttccaggtggacttacacactgggctgtcggagttctcggtgacgcagcgccggctggcccatggctggaatgagtttgttgctgacaacagcgaacctgtgtggaagaaatacctggatcagtttaagaaccccctgatcctgctgctgctgggctctgccctggtgagtgtcctcaccaaggagtatgaggacgccgtcagcatcgccacggcagtgcttgtcgtggtcactgtcgccttcatccaggagtacaggtcggagaaatctctggaagagctgaccaagctggttcctccagaatgtaactgcctaagagaaggaaaactccagcacctgcttgctcgagaactggttcctggtgatgtcgtatctctctcgatcggagaccggatccctgcagacatccgactcactgaggtcacggacctcttggtggatgaatccagtttcaccggggaagccgagccatgtagtaaaacagacagccccttgacaggcggtggggacctcaccaccctcagcaacatcgtcttcatggggaccctggtgcagtatgggaggggccagggggtcgtgattggaacaggggaaagctctcagttcggagaagtgtttaagatgatgcaggctgaagagacacctaaaactcctttgcagaaaagcatggacaggctaggaaagcaactgacactcttctcctttggcataatcggtctcatcatgctcattggctggtcgcaagggaaacaactcctgagtatgttcacgatcggggtcagcctggctgtggcggctattccagagggtctgcccatcgtcgtcatggtgacgctggtcctgggagtgctgcggatggccaagaagcgggtcatcgtgaagaagttacccatcgtggagactttaggttgctgcagcgttctctgttctgacaagacggggactctgactgccaatgaaatgacagtgacccagcttgtaacgtcagatgggcttcgtgccgaggtcagcggagttgggtatgacggtcaagggactgtgtgtcttctaccatccaaggaagtcattaaggaattttccaatgtctcagtgggaaagttagtggaggcgggctgtgttgccaacaatgcggtcatcagaaagaacgccgtgatggggcagcccaccgagggtgcattgatggccctggcgatgaagatggacttaagtgatattaaaaattcatatataagaaaaaaagagattccattcagttcagagcagaagtggatggcggtgaaatgcagtctgaagactgaggatcaggaagacatttacttcatgaaaggggccttggaagaggtgatccgctactgcaccatgtacaacaacgggggcatccccctgccgctgacgccccagcagaggtcattctgcctgcaggaagagaagaggatggggtcgctcggtttgcgggtgctggccctggcttctgggcccgagctggggcggctgacgtttctaggtcttgtgggcatcattgaccccccgagagttggcgtgaaggaagcagtccaggttctctccgagtctggtgtgtctgtgaagatgataacgggggatgccctggagacggccttggccataggaagaaacatcggcctgtgcaacgggaagctgcaagccatgtccggggaggaggtggacagcgtggagaagggcgagctggccgaccgcgtggggaaggtgtccgtgttcttcaggaccagcccaaagcacaagctcaaaatcatcaaggctctgcaggagtcaggggcgatcgtggccatgactggggatggggtgaacgacgcagtggccctgaagtctgcagacattgggatcgccatggggcagacagggacggacgtcagcaaagaggccgccaacatgatcctggtggatgatgacttctcagccatcatgaatgcagtggaggaaggcaagggtattttttacaacatcaaaaactttgtccgattccagctgagcacgagcatctccgccctgagtctcatcactctgtccaccgtgttcaacctgcccagccccctcaacgccatgcagatcctatggatcaacatcatcatggatgggccaccggcgcagagcttgggggtagagcccgttgacaaagacgccttcaggcagccaccacggagtgtgcgggacaccatcctcagcagagccctcatcctgaagatcctcatgtccgcggccatcatcatcagcgggaccctctttatcttctggaaggagatgcctgaagacagagcaagcactccccgcaccacgacgatgacgttcacttgttttgtgtttttcgatctcttcaacgccttgacctgccgctctcagaccaagctgatatttgagatcggctttctcaggaaccacatgttcctctactccgtcctggggtccatcctggggcagctggcggtcatttacatccccccgctgcagagggtcttccagacggagaacctgggagcgcttgatttgctgtttttaactggattggcctcatccgtcttcattttgtcagagctcctcaaactatgtgaaaaatactgttgcagccccaagagagtccagatgcaccctgaagatgtgtagtggaccgcactccgcggcaccttccctaatcatctcgatctggttgtgactgtggcccctgccgtgtctcctcgtcaggggagacttttaggaggccgcagccttccatcaccggatcagtttttcctcttaggaaagctgcaggaacctcgtgggctccagggacccaggcccacatccatccagcgttcccgctggctgtgggacagacagggaggggcctgtacagaaacaccacactgtttattaaatcacaatgatttttatt

SEQ ID NO: 49 - DNA, 2381 bp, Homo sapiens
cactgaataaactctaggttcccatttctttcagccagatcctcccagggaatcactacaggctggttagccaaaaagtcctgattttctgctcaatagaggtccttactggaaggcagcatgtccaatgttaccttgagaaaaatgtctcccacaggaaatgagatgaagagcaccactcagggaaccacacggaagcagcaggattttcacgaggtgaacaaaagaagaactttcttacaggataacagttggataaagaaacgccctgaagaagaaaaagatgaaaattacggtagggtggtgctcaaccgacataattcccatgatgcattggacaggaaagtaaatgagagagatgtgccaaaagctacaattagtcggtacagttctgatgacactttggacaggatctcagacagaaatgatgctgctaaaacatataaggccaataccttggataaccaactaaccaataggagcatgtccatgtttagatcactggaagtaacaaagttgcaacctggcggttcattgaatgccaacacctccaacaccatagcatccacttctgctactactcctgtaaagaagaagaggcagtcctggtttccaccgccccctccaggttacaatgcctcttcgagcacaggaaccaggagacgggaaccaggtgttcaccctccaatacctccaaagcccagttctcctgtttcttctcctaaccagctgagacaggataataggcagatacatccacctaaaccaggtgtatatacagaaaccaacagatctgctgaaagaaatataagtgaagaattggataatctcatcaaaatgaacaaaagcttgaataggaatcaaggtcttgatagtctcttcagagcaaatccaaaggtagaagaaagagagaaaagagccaaaagccttgaaagtctcatctatatgagtacccggacagataaagatggcaaaggaatccaaagccttggaagtccgattaaagttaatcaaaggactgacaaaaatgagaaaggaagacaaaatctcgaatctgttgctaaagtgaatgccaggatgaataaaacgagcagaagaagtgaagaccttgataatgctactgaagtaaatcccaaaggacatgaaaataccactggaaaaaaagaccttgatgggcttattaaagtggatcctgaaacaaataaaaatattacgaggggccagagccttgataatctcatcaaagtgacccctgaagtaaagagaagtaaccaaggttccaaagaccttaataacttcatcaaagtgtatccaggaacagaaaaaagtactgaagggggccaaagtctcgacagcctcattaaagtgactcctgaaagaaacagaactaaccaagggaaccaagacttggaaaatcttatcaaagtgatcccttcagcaaacaaaagcagtgaacaaggtcttgatgaacatattaatgtcagccccaaagctgtcaaaaacactgatggaaaacaagatcttgataaactcatcaaggtgaatcctgaaattttcacaaacaaccaaagaaaccaagatcttgctaacctcatcaaagtaaatcctgcagtaatcagaaacaatcagagccaagacttggaaaatcttatcaaagtgatcccttcagctcttagaaacactaatcgagaccagaacctggaaaatttaattgaagtaaattctcatgtgtctgaaaacaagaatggaagctctaacactggagccaagcaggcaggaccacaggatactgttgtgtacacaaggacatatgtggagaatagtaaatcacccaaggatggatatcaggagaatatctctggaaaatacatacaaactgtttattcaacttctgataggtctgtcattgaaagagatatgtgcacttactgccgaaaacccttgggtgtagaaactaaaatgattttagatgaattacaaatttgctgccattctacttgctttaagtgtgaaatatgcaagcagcctttggaaaatctacaagcgggtgatagtatttggatttatagacagacaatacactgtgaaccttgctactctaaaattatggcaaagtggattccataactctggcacaaggaaatcaagatgaaaagcactcattaaggaattaaagttacaagttttatcttaataatatgtaatctagaaaagctttcacattgaagatcaactcttgtacaaaattaacaattctgttattgcataagtaatctaattgtcttcaataaggtcacacacataaaaagagccatctggtctctggctagagttagcaataaaaagttcaaatggttccagaaaaaaaaaaaaaaaaaaaa

SEQ ID NO: 50 - DNA, 2393 bp, Homo sapiens
gagagagcgagacctgggagggaggggtcctccagcagaaaggggcgggggaaaaggtgcaaaagcagcgtgggagcgccgggctggcttcctgcggctgctgctggtctgactgggaagcagcaagccaccactacgaactctcaagaggagtgggagtgcgggagtccagagctgcctctgggaagtctgcagtagttgagcaaaggggtcctcacgttcctgagagctgggcaggggggattttggaacctggggcagccaagaacgagcagccaagggtacgggagattagttgtgcacagagcagtgctagtcgggcttgggggtggctggtgggcactgcgtgggaaaccttggtttgtagttttcttggtttgcgttactcctgttgggtagaattaccctccgcgcctttgtacaagacacggtgtctcctggggcaaggaaggagccaggatggcctgggctctgaagctgcctctggccgacgaagtgattgaatccgggttggtgcaggactttgatgctagcctgtccgggatcggccaggaactgggtgctggtgcctatagcatgagtgatgtccttgcattgcccatttttaagcaagaagagtcgagtttgcctcctgataatgagaataaaatcctgccttttcaatatgtgctttgtgctgctacctctccagcagtgaaactccatgatgaaaccctaacgtatctcaatcaaggacagtcttatgaaattcgaatgctagacaataggaaacttggagaacttccagaaattaatggcaaattggtgaagagtatattccgtgtggtgttccatgacagaaggcttcagtacactgagcatcagcagctagagggctggaggtggaaccgacctggagacagaattcttgacatagatatcccgatgtctgtgggtataatcgatcctagggctaatccaactcaactaaatacagtggagttcctgtgggaccctgcaaagaggacatctgtgtttattcaggtgcactgtattagcacagagttcactatgaggaaacatggtggagaaaagggggtgccattccgagtacaaatagataccttcaaggagaatgaaaacggggaatatactgagcacttacactcggccagctgccagatcaaagttttcaagcccaaaggtgcagacagaaagcaaaaaacggatagggaaaaaatggagaaacgaacacctcatgaaaaggagaaatatcagccttcctatgagacaaccatactcacagagtgttctccatggcccgagatcacgtatgtcaataactccccatcacctggcttcaacagttcccatagcagtttttctcttggggaaggaaatggttcaccaaaccaccagccagagccaccccctccagtcacagataacctcttaccaacaaccacacctcaggaagctcagcagtggttgcatcgaaatcgtttttctacattcacaaggcttttcacaaacttctcaggggcagatttattgaaattaactagagatgatgtgatccaaatctgtggccctgcagatggaatcagactttttaatgcattaaaaggccggatggtgcgtccaaggttaaccatttatgtttgtcaggaatcactgcagttgagggagcagcaacaacagcagcagcaacagcagcagaagcatgaggatggagactcaaatggtactttcttcgtttaccatgctatctatctagaagaactaacagctgttgaattgacagaaaaaattgctcagcttttcagcatttccccttgccagatcagccagatttacaagcaggggccaacaggaattcatgtgctcatcagtgatgagatgatacagaactttcaggaagaagcatgttttattctggacacaatgaaagcagaaaccaatgatagctatcatatcatactgaagtaggagtgcggcgtttcgtgcccagtggctgctccttccttcacctctgaaaacggccctcttgaagggggatatgaatggagatttgaaggtctgcaagaacctgactcgtctgactgtgtgtggaggagtccaggccatggaggcagaatcctggccctctgtgttggcccaagctcttgtggtacacacagattactgcccaatatgcagttctgcagctgttttagttaaatttctggaccttgttgttgttaaatatcagtagaaactctacataatttagagtgtatgtagggcataatgatgatgggaattgtgtgatgtttaacaggaagatcttaaattttgtgatatggagccctgtaatttttttcttatataaaaatgggtatctatattcataaaaaaaaaaaaaaaaaaaaaaa

SEQ ID NO: 51 - DNA, 1828 bp, Homo sapiens
acttctccctagagcaggggtgtttgccagcagcctgcactctcagaaatcagacttgagtggccggaacccttgagaccagaggcttaccatgctgctccctaggagggccaggaactgctgacgtgaccactggacagttattcgtgtctcttacaattaccaaacagaatggacaagcttaataaaataaccgtccccgccagtcagaagttgaggcagcttcaaaagatggtccatgatattaaaaacaatgaaggtggaataatgaataaaatcaaaaagctaaaagtcaaagcacctccaagtgttcctcgaagggactacgcttcagagagccctgctgacgaagaggagcagtggtccgatgactttgacagcgactatgaaaatccagatgagcactcggactcagagatgtacgtgatgcccgccgaggagaacgctgatgacagctacgagccgcctccagtagagcaggaaaccaggccggttcacccagccctgcccttcgccagaggcgagtatatagacaatcgatcaagccagaggcattccccacccttcagcaagacacttcccagtaagcccagctggccttcagagaaagcaaggctcacctccaccctgccggccctgactgctttgcagaaacctcaagtcccacccaaacccaaaggcctccttgaggatgaggctgattatgtggtccccgtggaagataatgatgaaaactatattcatcccacagaaagcagttcacctccacctgaaaaagctcccatggtgaatagatcaaccaagccaaattcctcaacgcccgcctctcctccaggaacagcttcaggtcgaaacagtggggcctgggaaaccaagtcacctccaccagctgcaccatccccgttgccacgggccgggaaaaaaccaacgacaccactgaagacaactccagttgcctctcaacagaatgcttcaagtgtttgtgaagaaaaacctatacctgctgaacgccaccgagggtcaagtcacagacaagaagctgtgcagtcaccagtgtttcctcctgcccagaaacaaatccaccaaaaacccatacctctgccaagatttacagaagggggaaacccaactgtggatgggcccctacccagcttttcatctaattccactatttcagaacaggaagctggcgttctctgcaagccatggtatgctggagcctgtgatcgaaagtctgctgaagaggcattgcacagatcaaacaaggatggatcatttcttattcggaaaagctctggccatgattccaaacaaccatatacactagttgtattctttaataagcgagtatataatattcctgtgcgatttattgaagcaacaaaacaatatgccttgggcagaaagaaaaatggtgaagagtactttggaagtgttgctgaaatcatcaggaatcatcaacatagtcctttggttcttattgacagtcagaataacacaaaagattccaccagactgaagtatgcagttaaagtttcataaagggggaaaaaaaagatcaataccattgcttcagacactttcccaaagtttctccttttgagaaaaagtcccaaaacttcatattttggattatgaatcatccagtaataaaatggaagatggagtcagctattgaagtggtcatccatttctttttaagaagctcatgtggacttgttctattgcctgacctgatgaactgttaatatctggtgaggttgagttatcatgctactaatattttccaaataaatatttttatttttaaaaataaaaaaaaaaaaaa

SEQ ID NO: 52 - DNA, 2397 bp, Homo sapiens
gcaagaactgaaacgaatggggattgaactgctttgcctgttctttctatttctaggaaggaatgatcacgtacaaggtggctgtgccctgggaggtgcagaaacctgtgaagactgcctgcttattggacctcagtgtgcctggtgtgctcaggagaattttactcatccatctggagttggcgaaaggtgtgataccccagcaaaccttttagctaaaggatgtcaattaaacttcatcgaaaaccctgtctcccaagtagaaatacttaaaaataagcctctcagtgtaggcagacagaaaaatagttctgacattgttcagattgcgcctcaaagcttgatccttaagttgagaccaggtggtgcgcagactctgcaggtgcatgtccgccagactgaggactacccggtggatttgtattacctcatggacctctccgcctccatggatgacgacctcaacacaataaaggagctgggctcccggctttccaaagagatgtctaaattaaccagcaactttagactgggcttcggatcttttgtggaaaaacctgtatcccctttcgtgaaaacaacaccagaagaaattgccaacccttgcagtagtattccatacttctgtttacctacatttggattcaagcacattttgccattgacaaatgatgctgaaagattcaatgaaattgtgaagaatcagaaaatttctgctaatattgacacacccgaaggtggatttgatgcaattatgcaagctgctgtgtgtaaggaaaaaattggctggcggaatgactccctccacctcctggtctttgtgagtgatgctgattctcattttggaatggacagcaaactagcaggcatcgtcattcctaatgacgggctctgtcacttggacagcaagaatgaatactccatgtcaactgtcttggaatatccaacaattggacaactcattgataaactggtacaaaacaacgtgttattgatcttcgctgtaacccaagaacaagttcatttatatgagaattacgcaaaacttattcctggagctacagtaggtctacttcagaaggactccggaaacattctccagctgatcatctcagcttatgaagaactgcggtctgaggtggaactggaagtattaggagacactgaaggactcaacttgtcatttacagccatctgtaacaacggtaccctcttccaacaccaaaagaaatgctctcacatgaaagtgggagacacagcttccttcagcgtgactgtgaatatcccacactgcgagagaagaagcaggcacattatcataaagcctgtggggctgggggatgccctggaattacttgtcagcccagaatgcaactgcgactgtcagaaagaagtggaagtgaacagctccaaatgtcaccacgggaacggctctttccagtgtggggtgtgtgcctgccaccctggccacatggggcctcgctgtgagtgtggcgaggacatgctgagcacagattcctgcaaggaggccccagatcatccctcctgcagcggaaggggtgactgctactgtgggcagtgtatctgccacttgtctccctatggaaacatttatgggccttattgccagtgtgacaatttctcctgcgtgagacacaaagggctgctctgcggaggtaacggcgactgtgactgtggtgaatgtgtgtgcaggagcggctggactggcgagtactgcaactgcaccaccagcacggactcctgcgtctctgaagatggagtgctctgcagcgggcgcggggactgtgtttgtggcaagtgtgtttgcacaaaccctggagcctcaggaccaacctgtgaacgatgtcctacctgtggtgacccctgtaactctaaacggagctgcattgagtgccacctgtcagcagctggccaagcccgagaagaatgtgtggacaagtgcaaactagctggtgcgaccatcagtgaagaagaagatttctcaaaggatggttctgtttcctgctctctgcaaggagaaaatgaatgtcttattacattcctaataactacagataatgaggggaaaaccatcattcacagcatcaatgaaaaagattgtccgaagcctccaaacattcccatgatcatgttaggggtttccctggctattcttctcatcggggttgtcctactgtgcatctggaagctactggtgtcatttcatgatcgtaaagaagttgccaaatttgaagcagaacgatcaaaagccaagtggcaaacgggaaccaatccactctacagaggatccacaagtacttttaaaaatgtaacttataaacacagggaaaaacaaaaggtagacctttccacagattgctagaactactttatgca

SEQ ID NO: 53 - DNA, 5891 bp, Homo sapiens
ccaggagagcggcgtggacgcgtgcgggcctagaggcccacgtgatccgcagggcggccgaggcaggaagctgtgagtgcgcggttgcggggtcgcattgtggctacggctttgcgtccccggcgggcagccccaggctggtccccgcctccgctctccccaccggcggggaaagcagctggtgtgggaggaaaggctccatcccccgccccctctctcccgctgttggctggcaggatcttttggcagtcctgtggcctcgctccccgcccggatcctcctgaccctgagattcgcgggtctcacgtcccgtgcacgccttgcttcggcctcagttaagcctttgtggactccaggtccctggtgagattagaaacgtttgcaaacatgtcccggatcgaaaagatgagcattctgggcgtgcggagttttggaatagaggacaaagataagcaaattatcactttcttcagcccccttacaattttggttggacccaatggggcgggaaagacgaccatcattgaatgtctaaaatatatttgtactggagatttccctcctggaaccaaaggaaatacatttgtacacgatcccaaggttgctcaagaaacagatgtgagagcccagattcgtctgcaatttcgtgatgtcaatggagaacttatagctgtgcaaagatctatggtgtgtactcagaaaagcaaaaagacagaatttaaaactctggaaggagtcattactagaacaaagcatggtgaaaaggtcagtctgagctctaagtgtgcagaaattgaccgagaaatgatcagttctcttggggtttccaaggctgtgctaaataatgtcattttctgtcatcaagaagattctaattggcctttaagtgaaggaaaggctttgaagcaaaagtttgatgagattttttcagcaacaagatacattaaagccttagaaacacttcggcaggtacgtcagacacaaggtcagaaagtaaaagaatatcaaatggaactaaaatatctgaagcaatataaggaaaaagcttgtgagattcgtgatcagattacaagtaaggaagcccagttaacatcttcaaaggaaattgtcaaatcctatgagaatgaacttgatccattgaagaatcgtctaaaagaaattgaacataatctctctaaaataatgaaacttgacaatgaaattaaagccttggatagccgaaagaagcaaatggagaaagataatagtgaactggaagagaaaatggaaaaggtttttcaagggactgatgagcaactaaatgacttatatcacaatcaccagagaacagtaagggagaaagaaaggaaattggtagactgtcatcgtgaactggaaaaactaaataaagaatctaggcttctcaatcaggaaaaatcagaactgcttgttgaacagggtcgtctacagctgcaagcagatcgccatcaagaacatatccgagctagagattcattaattcagtctttggcaacacagctagaattggatggctttgagcgtggaccattcagtgaaagacagattaaaaattttcacaaacttgtgagagagagacaagaaggggaagcaaaaactgccaaccaactgatgaatgactttgcagaaaaagagactctgaaacaaaaacagatagatgagataagagataagaaaactggactgggaagaataattgagttaaaatcagaaatcctaagtaagaagcagaatgagctgaaaaatgtgaagtatgaattacagcagttggaaggatcttcagacaggattcttgaactggaccaggagctcataaaagctgaacgtgagttaagcaaggctgagaaaaacagcaatgtagaaaccttaaaaatggaagtaataagtctccaaaatgaaaaagcagacttagacaggaccctgcgtaaacttgaccaggagatggagcagttaaaccatcatacaacaacacgtacccaaatggagatgctgaccaaagacaaagctgacaaagatgaacaaatcagaaaaataaaatctaggcacagtgatgaattaacctcactgttgggatattttcccaacaaaaaacagcttgaagactggctacatagtaaatcaaaagaaattaatcagaccagggacagacttgccaaattgaacaaggaactagcttcatctgagcagaataaaaatcatataaataatgaactaaaaagaaaggaagagcagttgtccagttacgaagacaagctgtttgatgtttgtggtagccaggattttgaaagtgatttagacaggcttaaagaggaaattgaaaaatcatcaaaacagcgagccatgctggctggagccacagcagtttactcccagttcattactcagctaacagacgaaaaccagtcatgttgccccgtttgtcagagagtttttcagacagaggctgagttacaagaagtcatcagtgatttgcagtctaaactgcgacttgctccagataaactcaagtcaacagaatcagagctaaaaaaaaaggaaaagcggcgtgatgaaatgctgggacttgtgcccatgaggcaaagcataattgatttgaaggagaaggaaataccagaattaagaaacaaactgcagaatgtcaatagagacatacagcgcctaaagaacgacatagaagaacaagaaacactcttgggtacaataatgcctgaagaagaaagtgccaaagtatgcctgacagatgttacaattatggagaggttccagatggaacttaaagatgttgaaagaaaaattgcacaacaagcagctaagctacaaggaatagacttagatcgaactgtccaacaagtcaaccaggagaaacaagagaaacagcacaagttagacacagtttctagtaagattgaattgaatcgtaagcttatacaggaccagcaggaacagattcaacatctaaaaagtacaacaaatgagctaaaatctgagaaacttcagatatccactaatttgcaacgtcgtcagcaactggaggagcagactgtggaattatccactgaagttcagtctttgtacagagagataaaggatgctaaagagcaggtaagccctttggaaacaacattggaaaagttccagcaagaaaaagaagaattaatcaacaaaaaaaatacaagcaacaaaatagcacaggataaactgaatgatattaaagagaaggttaaaaatattcatggctatatgaaagacattgagaattatattcaagatgggaaagacgactataagaagcaaaaagaaactgaacttaataaagtaatagctcaactaagtgaatgcgagaaacacaaagaaaagataaatgaagatatgagactcatgagacaagatattgatacacagaagatacaagaaaggtggctacaagataaccttactttaagaaaaagaaatgaggaactaaaagaagttgaagaagaaagaaaacaacatttgaaggaaatgggtcaaatgcaggttttgcaaatgaaaagtgaacatcagaagttggaagagaacatagacaatataaaaagaaatcataatttggcattagggcgacagaaaggttatgaagaagaaattattcattttaagaaagaacttcgagaaccacaatttcgggatgctgaggaaaagtatagagaaatgatgattgttatgaggacaacagaacttgtgaacaaggatctggatatttattataagactcttgaccaagcaataatgaaatttcacagtatgaaaatggaagaaatcaataaaattatacgtgacctgtggcgaagtacctatcgtggacaagatattgaatacatagaaatacggtctgatgccgatgaaaatgtatcagcttctgataaaaggcggaattataactaccgagtggtgatgctgaagggagacacagccttggatatgcgaggacgatgcagtgctggacaaaaggtattagcctcactcatcattcgcctggccctggctgaaacgttctgcctcaactgtggcatcattgccttggatgagccaacaacaaatcttgaccgagaaaacattgaatctcttgcacatgctctggttgagataataaaaagtcgctcacagcagcgtaacttccagcttctggtaatcactcatgatgaagattttgtggagcttttaggacgttctgaatatgtggagaaattctacaggattaaaaagaacatcgatcagtgctcagagattgtgaaatgcagtgttagctccctgggattcaatgttcattaaaaatatccaagatttaaatgccatagaaatgtaggtcctcagaaagtgtataataagaaacttatttctcatatcaacttagtcaataagaaaatatattctttcaaaggaacattgtgtctaggattttggatgttgagaggttctaaaatcatgaaacttgtttcactgaaaattggacagattgcctgtttctgatttgctgctcttcatcccattccaggcagcctctgtcaggccttcagggttcagcagtacagccgagactcgactctgtgcctccctccccagtgcaaatgcatgcttcttctcaaagcactgttgagaaggagataattactgccttgaaaatttatggttttggtatttttttaaatcatagttaaatgttacctctgaatttacttccttgcatgtggtttgaaaaactgagtattaatatctgaggatgaccagaaatggtgagatgtatgtttggctctgcttttaactttataaatccagtgacctctctctctgggacttggtttccccaactaaaatttgaagtagttgaatggggtctcaaagtttgacaggaaccttaagtaatcatctaagtcagtacccaccaccttcttctcctacatatcccttccagatggtcatccagactcagagctctctctacagagaggaaattctccactgtgcacacccacctttggaaagctctgaccacttgaggcctgatctgcccatcgtgaagaagcctgtaacactcctctgcgtctatcctgtgtagcatactggcttcaccatcaatcctgattcctctctaagtgggcattgccatgtggaaggcaagccaggctcactcacagagtcaaggcctgctccctgtagggtccaaccagacctggaagaacaggcctctccatttgctcttcagatgccacttctaagaaaagcctaatcacagtttttcctggaattgccagctgacatcttgaatccttccattccacacagaatgcaaccaagtcacacgcttttgaattatgctttgtagagttttgtcattcagagtcagccaggaccataccgggtcttgattcagtcacatggcatggttttgtgccatctgtagctataatgagcatgtttgcctagacagcttttctcaactgggtccagaagagaattaagccctaaggtcctaaggcatctatctgtgctaggttaaatggttggcccccaaagatagacaggtcctgatttctagaacccgtgactgttactttatacagcaaaggaaactttgcagatgtgattaaagctaaggaccttaagacagagtatcctgggggtggtggtggggtgggggggggtcctaaatgtaatcacgagtaagattaagagcaaatcaattctagtcatatattaaacatccacaataaccaagatatttttatcccaagaatgcaagatttcagaaaatgaaaaatctgttgataaatccatcactataataaaaccgaaggtgaaaaaaattctgaaaaaaaaaaaaaaaaaaaaaaaaaaaa

SEQ ID NO: 54 - DNA, 1900 bp, Homo sapiens
gcggccgcggaggaggaggaaggggaggagggcgaggcgggaggtgcaggagggaccctcgccatgggtccacgggcctagagtggcggaagataccggcctggtgccaaactggctactgctgcttcctgtggcctccatggctgaggactggctggactgcccggccctgggccctggctggaagcgccgcgaagtctttcgcaagtcaggggccacctgtggacgctcagacacctattaccagagccccacaggagacaggatccgaagcaaagttgagctgactcgatacctgggccctgcgtgtgatctcaccctcttcgacttcaaacaaggcatcttgtgctatccagcccccaaggcccatcccgtggcggttgccagcaagaagcgaaagaagccttcaaggccagccaagactcggaaacgtcaggttggaccccagagtggtgaggtcaggaaggaggccccgagggatgagaccaaggctgacactgacacagccccagcttcattccctgctcctgggtgctgtgagaactgtggaatcagcttctcaggggatggcacccaaaggcagcggctcaaaacgttgtgcaaagactgtcgagcacagagaattgccttcaaccgggaacagagaatgtttaagcgtgtgggctgtggggagtgtgcagcctgccaggtaacagaagactgtggggcctgctccacctgcctcctgcagctgccccatgatgtggcatcggggctgttctgcaagtgtgaacggagacgctgcctccggattgtggaaaggagccgagggtgtggagtatgccggggctgtcagacccaagaggattgtggccattgccccatctgccttcgccctccccgccctggtctcaggcgccagtggaaatgtgtccagcgacgttgcctacggggtaaacatgcccgccgcaagggaggctgtgactccaagatggctgccaggcggcgccccggagcccagccactgcctccaccacccccatcacagtccccagagcccacagagccgcagccctacacgaaccgccggcagaaccgcaagtgcggggcctgtgcagcctgcctacggcggatggactgtggccgctgcgacttctgctgcgacaagcccaaattcgggggcagcaaccagaagcgccagaagtgtcgttggcgccaatgcctgcagtttgccatgaagcggctgctgcccagtgtctggtcagagtctgaggatggggcaggatcgcccccaccttaccgtcgtcgaaagaggcccagctctgcccgacggcaccatcttggccctaccttgaagcccaccttggctacacgcacagcccaaccagaccatacccaggctccaacgaagcaggaagcaggtggtggctttgtgctgcccccgcctggcactgaccttgtgtttttacgggaaggcgcaagcagtcctgtgcaggtgccgggccctgttgcagcttccacagaagccctgttgcaggcagtagacccaggcctgccttctgtgaagcaagagccacctgacccagaggaggacaaggaggagaacaaggatgattctgcctccaaattggccccagaggaagaggcaggaggggctggcacacccgtgatcacggagattttcagcctgggtggaacccgcttccgagatacagcagtctggttgccaagtctgcagggcaggcactcgggaagggaagatggatgtaaagtgtgggagaccgaggacacagtggagcccacgagcacgagctggaacccacgaggatggcctggaacccatgtcagtctctcaccacctccagcttcgatgatgtgggtgtcctgcagaagaagctggtgcccttcctcacagagttaa

SEQ ID NO: 55 - DNA, 3803 bp, Homo sapiens
ggctcccgacacccgagccccgccgcgcctcccgctcccggctcccggctcccgctcctggctccctccgcctcccccgcccctcgccccgccgccgaagaggcccgctcccggtcggacgcctgggtctgccgggaagagcgatgagagagatgctgcccccacccccttaggcccgagggatcaggagctatgggaccagaggccctgtcatctttactgctgctgctcttggtggcaagtggagatgctgacatgaagggacattttgatcctgccaagtgccgctatgccctgggcatgcaggaccggaccatcccagacagtgacatctctgcttccagctcctggtcagattccactgccgcccgccacagcaggttggagagcagtgacggggatggggcctggtgccccgcagggtcggtgtttcccaaggaggaggagtacttgcaggtggatctacaacgactgcacctggtggctctggtgggcacccagggacggcatgccgggggcctgggcaaggagttctcccggagctaccggctgcgttactcccgggatggtcgccgctggatgggctggaaggaccgctggggtcaggaggtgatctcaggcaatgaggaccctgagggagtggtgctgaaggaccttgggccccccatggttgcccgactggttcgcttctacccccgggctgaccgggtcatgagcgtctgtctgcgggtagagctctatggctgcctctggagggatggactcctgtcttacaccgcccctgtggggcagacaatgtatttatctgaggccgtgtacctcaacgactccacctatgacggacataccgtgggcggactgcagtatgggggtctgggccagctggcagatggtgtggtggggctggatgactttaggaagagtcaggagctgcgggtctggccaggctatgactatgtgggatggagcaaccacagcttctccagtggctatgtggagatggagtttgagtttgaccggctgagggccttccaggctatgcaggtccactgtaacaacatgcacacgctgggagcccgtctgcctggcggggtggaatgtcgcttccggcgtggccctgccatggcctgggagggggagcccatgcgccacaacctagggggcaacctgggggaccccagagcccgggctgtctcagtgccccttggcggccgtgtggctcgctttctgcagtgccgcttcctctttgcggggccctggttactcttcagcgaaatctccttcatctctgatgtggtgaacaattcctctccggcactgggaggcaccttcccgccagccccctggtggccgcctggcccacctcccaccaacttcagcagcttggagctggagcccagaggccagcagcccgtggccaaggccgaggggagcccgaccgccatcctcatcggctgcctggtggccatcatcctgctcctgctgctcatcattgccctcatgctctggcggctgcactggcgcaggctcctcagcaaggctgaacggagggtgttggaagaggagctgacggttcacctctctgtccctggggacactatcctcatcaacaaccgcccaggtcctagagagccacccccgtaccaggagccccggcctcgtgggaatccgccccactccgctccctgtgtccccaatggctctgcgttgctgctctccaatccagcctaccgcctccttctggccacttacgcccgtccccctcgaggcccgggcccccccacacccgcctgggccaaacccaccaacacccaggcctacagtggggactatatggagcctgagaagccaggcgccccgcttctgcccccacctccccagaacagcgtcccccattatgccgaggctgacattgttaccctgcagggcgtcaccgggggcaacacctatgctgtgcctgcactgcccccaggggcagtcggggatgggccccccagagtggatttccctcgatctcgactccgcttcaaggagaagcttggcgagggccagtttggggaggtgcacctgtgtgaggtcgacagccctcaagatctggttagtcttgatttcccccttaatgtgcgtaagggacaccctttgctggtagctgtcaagatcttacggccagatgccaccaagaatgccaggaatgatttcctgaaagaggtgaagatcatgtcgaggctcaaggacccaaacatcattcggctgctgggcgtgtgtgtgcaggacgaccccctctgcatgattactgactacatggagaacggcgacctcaaccagttcctcagtgcccaccagctggaggacaaggcagccgagggggcccctggggacgggcaggctgcgcaggggcccaccatcagctacccaatgctgctgcatgtggcagcccagatcgcctccggcatgcgctatctggccacactcaactttgtacatcgggacctggccacgcggaactgcctagttggggaaaatttcaccatcaaaatcgcagactttggcatgagccggaacctctatgctggggactattaccgtgtgcagggccgggcagtgctgcccatccgctggatggcctgggagtgcatcctcatggggaagttcacgactgcgagtgacgtgtgggcctttggtgtgaccctgtgggaggtgctgatgctctgtagggcccagccctttgggcagctcaccgacgagcaggtcatcgagaacgcgggggagttcttccgggaccagggccggcaggtgtacctgtcccggccgcctgcctgcccgcagggcctatatgagctgatgcttcggtgctggagccgggagtctgagcagcgaccacccttttcccagctgcatcggttcctggcagaggatgcactcaacacggtgtgaatcacacatccagctgcccctccctcagggagcgatccaggggaagccagtgacactaaaacaagaggacacaatggcacctctgcccttcccctcccgacagcccatcacctctaatagaggcagtgagactgcaggtgggctgggcaagggagctgatgccccttctccccttcctggacacactctcatgtccccttcctgttcttccttcctagaagcccctgtcgcccacccagctggtcctgtggatgggatcctctccaccctcctctagccatcccttggggaagggtggggaaaaatataggatagacactggacatggccaattggagaacctgggccccactggacaacactgattcctggagaggagaccccagcttctctctccctgtcacacactggaccccactggctgagaatctgggggtgaggaggacaagaaggagaggaaaatgtttccttgtgcctgctcctgtacttgtcctcagcttgggcttcttcctcctccatcacctgaaacactggacctgggggtagccccgccccagccctcagtcacccccacttcccacttgcagtcttgtagctagactctctaagcctatacgtttctgtggagtaaatattgggattggggggaaatagggtgcaacgcccatagccttggggttggacatctctagtgtagctgccacattgatttttctataatcacttggggtttgtacatttttggggggagagacacagattttacactaatatatggacctagcttgaggcaattttaatccctgcactaggcaggtaataataaatgttgagttttccaaaaaaaaaaaaaaaaaaaaaaaaaaaaa

SEQ ID NO: 56 - DNA, 1668 bp, Homo sapiens
gagaagccgggagcgagcccaggcggcagtcttgattcccttttggccagcagtgtttaggtctgtcagtactgcactgcaagaatggcagattttgggatctctgctggccagtttgtggcagtggtctgggataagtcatccccagtggaggctctgaaaggtctggtggataagcttcaagcgttaaccggcaatgagggccgcgtgtctgtggaaaacatcaagcagctgttgcaatctgcccacaaagaatccagctttgacattattttgtcaggtttagtcccaggaagcaccactctgcacagtgctgagattttggctgaaatcgcccggatccttcggcctggtggatgtctttttctgaaggagccagtagagacagctgtagataacaatagcaaagtgaagacagcatctaagctgtgttcagccctgactctttctggtcttgtggaagtgaaagagctgcagcgggagcccctaacccctgaggaagtacagtctgttcgagaacaccttggtcatgaaagtgacaacctgctgtttgttcagatcacaggcaaaaaaccaaactttgaagtgggttcttctaggcagcttaagctttccatcaccaagaagtcttctccttcagtgaaacctgctgtggaccctgctgctgccaagctgtggaccctctcagccaacgatatggaggacgacagcatggatctcattgactcagatgagctgctggatccagaagatttgaagaagccagatccagcttccctgcgggctgcttcttgtggggaagggaaaaagaggaaggcctgtaagaactgcacctgtggccttgccgaagaactggaaaaagagaagtcaagggaacagatgagctcccaacccaagtcagcttgtggaaactgctacctgggcgatgccttccgctgtgccagctgcccctaccttgggatgccagccttcaaacctggggaaaaggtgcttctgagtgatagcaatcttcatgatgcctaggaggttcctgacatgggacccatctgctcctccagccaactcctgtccctcacatcccaccatggtggctcctcccacctcctctggatttgttcactctgagatctgtttgcagagtgggtgcttagcagacagagtgaagctggctggggggcacagtggtgtgtagtgctgctgtgtatcaaaagaccaaggtattatgggacctggtttcagaatgggatgggtttcttcacctcatgttaagagaagggagtgtgtcctgaagaagcccttcttctgatgttaaaatgctgaccagaacgctcttgagcccaggcatcgttgagcattaacactctgtgacagagctgcagacccctgccttgagtctcatctcagcaatgctgccaccctcttgtctttcagagttgttagtttactccattctttgtgacacgagtcaagtggctcacaacctcctcagggcaccagaggactcactcactggttgctgtgatgatatccagtgtccctctgcccccttccatccccaaccacatttgactgtagcattgcatctgtgtcctgttgtcatttatgttaaccttcaggtattaaacttgctgcatatcttgaaaaaaaaaaaaaaaaaaaaaaaaaaaa

SEQ ID NO: 57 - DNA, 1044 bp, Homo sapiens
cacgagggcgtccctctgcctgcccactcagtggcaacacccgggagctgttttgtcctttgtggagcctcagcagttccctctttcagaactcactgccaagagccctgaacaggagccaccatgcagtgcttcagcttcattaagaccatgatgatcctcttcaatttgctcatctttctgtgtggtgcagccctgttggcagtgggcatctgggtgtcaatcgatggggcatcctttctgaagatcttcgggccactgtcgtccagtgccatgcagtttgtcaacgtgggctacttcctcatcgcagccggcgttgtggtctttgctcttggtttcctgggctgctatggtgctaagactgagagcaagtgtgccctcgtgacgttcttcttcatcctcctcctcatcttcattgctgaggttgcagctgctgtggtcgccttggtgtacaccacaatggctgagcacttcctgacgttgctggtagtgcctgccatcaagaaagattatggttcccaggaagacttcactcaagtgtggaacaccaccatgaaagggctcaagtgctgtggcttcaccaactatacggattttgaggactcaccctacttcaaagagaacagtgcctttcccccattctgttgcaatgacaacgtcaccaacacagccaatgaaacctgcaccaagcaaaaggctcacgaccaaaaagtagagggttgcttcaatcagcttttgtatgacatccgaactaatgcagtcaccgtgggtggtgtggcagctggaattgggggcctcgagctggctgccatgattgtttccatgtatctgtactgcaatctacaataagtccacttctgcctctgccactactgctgccacatgggaaactgtgaagaggcaccctgggcaagcagcagtgattgggggaggggacaggatctaacaatgtcacttgggccagaatggacctggcctttctgctcccagacttgggggctagattagggaccactccttttaggcgatgcctgactttgcctt

SEQ ID NO: 58 - DNA, 1764 bp, Homo sapiens
gggaaactgtgtaaagggtggggaaacttgaaagttggatgctgcagacccggcatgggtagcaagaaactaaaacgagtgggtttatcacaagagctgtgtgaccgtctgagtagacatcagatccttacctgtcaggactttttatgtctttccccactggagcttatgaaggtgactggtctgagttatcgaggtgtccatgaacttctatgtatggtcagcagggcctgtgccccaaagatgcaaacggcttatgggataaaagcacaaaggtctgctgatttctcaccagcattcttatctactaccctttctgctttggacgaagccctgcatggtggtgtggcttgtggatccctcacagagattacaggtccaccaggttgtggaaaaactcagttttgtataatgatgagcattttggctacattacccaccaacatgggaggattagaaggagctgtggtgtacattgacacagagtctgcatttagtgctgaaagactggttgaaatagcagaatcccgttttcccagatattttaacactgaagaaaagttacttttgacaagtagtaaagttcatctttatcgggaactcacctgtgatgaagttctacaaaggattgaatctttggaagaagaaattatctcaaaaggaattaaacttgtgattcttgactctgttgcttctgtggtcagaaaggagtttgatgcacaacttcaaggcaatctcaaagaaagaaacaagttcttggcaagagaggcatcctccttgaagtatttggctgaggagttttcaatcccagttatcttgacgaatcagattacaacccatctgagtggagccctggcttctcaggcagacctggtgtctccagctgatgatttgtccctgtctgaaggcacttctggatccagctgtgtgatagccgcactaggaaatacctggagtcacagtgtgaatacccggctgatcctccagtaccttgattcagagagaagacagattcttattgccaagtcccctctggctcccttcacctcatttgtctacaccatcaaggaggaaggcctggttcttcaagcctatggaaattcctagagacagataaatgtgcaaacctgttcatcttgccaagaaaaatccgcttttttgccacagaaacaaaatattgggaaagagtcttgtggtgaaacacccatcgttctttgctaaaacatttggttgctactgtgtagactcagcttaagtcatggaattctagaggatgtatctcacaagtaggatcaagaacaagcccaacagtaatctgcatcataagctgatttgataccatggcactgacaatgggcactgatttgataccatggcactgacatgggcacacagggaacaggaaatgggaatgagagcaagggttgggttgtgttcgtggaacacataggttttttttttttaactttctctttctaaaatatttcattttgatggaggtgaaatttatataagatgaaattaaccattttaaagtaaacaattccgtggcaactagatatcatgatgtgcaaccagcatctctgtctagttccaaatattttcatcaccccaaaagcaagacccataaccattatgcaagtgttcctatttccccctcctcccagctcctggaaacccaccaatctactttgttgctatggctttacctattctggatatttcatataaatggaatcatatagtgtcataaaaaaaaaaaaa

SEQ ID NO: 59 - DNA, 3738 bp, Homo sapiens
cccgggtcggaccgcctgggtctgccgggaagagcgatgagaggtgtcgtaaggtggctattcactgagcgatggggttggacttgaaggaatgccaagagatgctgcccccacccccttaggcccgagggatcaggagctatgggaccagaggccctgtcatctttactgctgctgctcttggtggcaagtggagatgctgacatgaagggacattttgatcctgccaagtgtcgctatgccctgggcatgcaggaccggaccatcccagacagtgacatctctgcttccagctcctggtcagattccactgccgcccgccacagcaggttggagagcagtgacggggatggggcctggtgccccgcagggtcggtgtttcccaaggaggaggagtacttgcaggtggatctacaacgagtgcacctggtggctctggtgggcacccagggacggcatgccgggggcctgggcaaggagttctcccggagctaccggctgcgttactcccgggatggtcgccgctggatgggctggaaggaccgctggggtcaggaggtgatctcaggcaatgaggaccctgagggagtggtgctgaaggaccttgggccccccatggttgcccgactggttcgcttctacccccgggctgaccgggtcatgagtgtctgtctgcgggtagagctctatggctgcctctggagggatggactcctgtcttacaccgcccctgtggggcagacaatgtatttatctgaggccgtgtacctcaacgactccacctatgacggacataccgtgggcggactgcagtatgggggtctgggccagctggcagatggtgtggtggggctggatgactttaggaagagtcaggagctgcgggtctggccaggctatgactatgtgggatggagcaaccacagcttctccagtggctatgtggagatggagtttgagtttgaccggctgagggccttccaggctatgcaggtccactgtaacaacatgcacacgctgggagcccgtctgcctggcggggtggaatgtcgcttccggcgtggccctgccatggcctgggagggggagcccatgcgccacaacctagggggcaacctgggggaccccagagcccgggctgtctcagtgccccttggcggccgtgtggctcgctttctgcagtgccgcttcctctttgcggggccctggttactcttcagcgaaatctccttcatctctgatgtggtgaacaattcctctccggcactgggaggcaccttcccgccagccccctggtggccgcctggcccacctcccaccaacttcagcagcttggagctggagcccagaggccagcagcccgtggccaaggccgaggggagcccgaccgccatcctcatcggctgcctggtggccatcatcctgctcctgctgctcatcattgccctcatgctctggcggctgcactggcgcaggctcctcagcaaggctgaacggagggtgttggaagaggagctgacggttcacctctctgtccctggggacactatcctcatcaacaaccgcccaggtcctagagagccacccccgtaccaggagccccggcctcgtgggaatccgccccactccgctccctgtgtccccaatggctctgcgttgctgctctccaatccagcctaccgcctccttctggccacttacgcccgtccccctcgaggcccgggcccccccacacccgcctgggccaaacccaccaacacccaggcctacagtggggactatatggagcctgagaagccaggcgccccgcttctgcccccacctccccagaacagcgtcccccattatgccgaggctgacattgttaccctgcagggcgtcaccgggggcaacacctatgctgtgcctgcactgcccccaggggcagtcggggatgggccccccagagtggatttccctcgatctcgactccgcttcaaggagaagcttggcgagggccagtttggggaggtgcacctgtgtgaggtcgacagccctcaagatctggttagtcttgatttcccccttaatgtgcgtaagggacaccctttgctggtagctgtcaagatcttacggccagatgccaccaagaatgccaggaatgatttcctgaaagaggtgaagatcatgtcgaggctcaaggacccaaacatcattcggctgctgggcgtgtgtgtgcaggacgaccccctctgcatgattactgactacatggagaacggcgacctcaaccagttcctcagtgcccaccagctggaggacaaggcagccgagggggcccctggggacgggcaggctgcgcaggggcccaccatcagctacccaatgctgctgcatgtggcagcccagatcgcctccggcatgcgctatctggccacactcaactttgtacatcgggacctggccacgcggaactgcctagttggggaaaatttcaccatcaaaatcgcagactttggcatgagccggaacctctatgctggggactattaccgtgtgcagggccgggcagtgctgcccatccgctggatggcctgggagtgcatcctcatggggaagttcacgactgcgagtgacgtgtgggcctttggtgtgaccgtgtgggaggtgctgatgctctgtagggcccagccctttgggcagctcaccgacgagcaggtcatcgagaacgcgggggagttcttccgggaccagggccggcaggtgtacctgtcccggccgcctgcctgcccgcagggcctatatgagctgatgcttcggtgctggagccgggagtctgagcagcgaccacccttttcccagctgcatcggttcctggcagaggatgcactcaacacggtgtgaatcacacatccagctgcccctccctcagggagcgatccaggggaagccagtgacactaaaacaagaggacacaatggcacctctgccccttcccctcccgacagcccatcacctctaatagaggcagtgagactgcaggctgggcccacccagggagctgatgccccttctccccttcctggacacactctcatgtccccttcctgttcttccttcctagaagcccctgtcgcccacccagctggtcctgtggatgggatcctctccacccacctctagccatcccttggggaagggtggggagaaatataggatagacactggacatggcccattggagcacctgggccccactggacaacactgattcctggacaggtggctgcgcccccagcttctctctccctgtcacacactggaccccactggctgagaatctgggggtgaggaggacaagaaggagaggaaaatgtttccttgtgcctgctcctgtacttgtcctcagcttgggcttcttcctcctccatcacctgaaacactggacctgggggtagccccgccccagccctcagtcaccccccacttcccacctgcagtcttgtagctagaacttctctaagcctatacgtttctgtggagtaaatattgggattggggggaaagagggagcaacggcccatagccttggggttggacatctctagtgtagctgccacattgatttttctataatcacttgggtttgtacatttttggggggagagacacagatttttacactaatatatggacctagcttgaggcaattttaatcccctgcactaggcaggtaataataaaggttgagttttccac

SEQ ID NO: 60 - DNA, 1302 bp, Homo sapiens
ggaagctatgagggaccctgtgagtagccagtacagttcctttcttttctggaggatgcccatcccagaactggatctgtcggagctggaaggcctgggtctgtcagatacagccacctacaaggtcaaagacagcagcgttggcaaaatgatcgggcaagcaactgcagcagaccaggagaaaaaccctgaaggtgatggcctccttgagtacagcaccttcaacttctggagagctcccattgccagcatccactccttcgaactggacttgctctaaggccaagacttctctctcccatcaccttgccctcattgtcttccctctcaagccccttcctttccactcctttcccattttaatcttgttctctccctactgtgttggtggtgctgatgaatctgccagagttgagttctatgtatttatttatctatctgtctactccatttctctcaaaagccctcaagtcacaaagtaaatggttcaagcaatggagtactgggtcacagggattcctcctttcccccccaaatattaactccagaaactaggcctgactggggacacctgagagtagtatagtagtgcaaaatggaagactgatttttgactctattataatcagcttcagagattccttaaaccttcctaatttcctgctccagggcagtaaacacaaatatttcttcaaggggtgatgaaaacctcggaagttttaatttgaggttatctgctacgaaacagtatttctaaaaggctaaagtgataagtctcttgcttttttttgatcctgctcttatattcttttttttcctcagagaaatcaggagggtagttagaggtataaaacaggaggaaatattatggaaaatgaaaatagggaaaataattgaatcattttagaagtagctaatttcttttctcaaaagagtgtcccttcttcacacctactcactttacaactttgctcctaactgtgggttgaaaactctagctaaagaaagttatcaaatcttaacatgcattcctactattatgatagtttttaaggtttcaattcaatcttctgaacggcataagtcctattttagccttacctcctgcatttgcaatacgtaatactgatcagtgggcacagttcttcagctacattgagaccctgaaatgaacaattatattctgactcgacatcttgtccccaatccttccaaaaatattgatggtgatttgtgctaccatttactcgtttatttaataaagacattcaatcccaggaaaaaaaaaaaaaaaaaaaaaaa

SEQ ID NO: 61 - DNA, 1471 bp, Homo sapiens
aaactttttccccggcgtggtctcactcgcgatttaaggcataggtgtcgccgagccgggaggctgggagtcgccaggcgtgcgggggagaggcctgggccgcgccgcggcggggggtggaggaagagggcaggcgaggcgggaaggtgggctctggccgccgggagccggggacggagccgccgccgttgcccctagcggggagcagccgggaggagggggccgcagtcgggagaggggaccccaccatgcccaaagtcttcctggtgaagaggaggagcctgggggtctcggtccgcagctgggatgagctcccggatgagaaaagggcagacacctacatcccagtgggcctaggccgcctgctccacgacccccccgaggactgccgcagcgacggcggcagcagcagcggcagcggcagcagcagcgcgggggagcctggaggagcagagagcagctcgtccccgcacgcccccgagagcgaaacccccgagcccggcgacgccgagggccccgatggacacctggcgaccaagcagcgcccggtcgccagatcgaaaatcaagttcaccacaggcacgtgcagcgactcggtggttcacagctgtgacctgtgtggcaagggcttccgtctgcagcgcatgctgaaccgtcacctcaagtgccacaaccaggtgaaaagacacctgtgcaccttctgcggcaagggcttcaacgacaccttcgacctgaagaggcacgtccgcacacacacaggcattcgtccctacaaatgcaacgtctgcaataaagccttcacccagcgctgctctctggagtcccacctgaagaaaatccatggggtgcagcagcagtatgcctataagcagcggcgggacaagctctacgtctgcgaggattgcggctacacgggccccacccaggaggacctgtacctgcacgtgaacagtgcccatccgggcagctcgtttctcaaaaagacatctaaaaaactggcagcccttctgcagggcaagctgacatccgcacaccaggagaataccagcctgagtgaggaggaggagaggaagtgaggagaaggaaggggaggacagacgttcacactgccacgtatgtctacgtggatttttggttttcagcttcccccaccccactggctcttcttaattagaagtgaccagttcacctctgtgtccttttgaaacatcagcagtagggtccattccaagattgtcagttaccgttagtgacgtcaggccctgtaacctgtgtcctgtctggcgcagttgctcacattcaccaaagtttgttttcatgatcctgatggccaagaacaccgtgtgggattttttttcccccaaggattttcacacacggaaggagaggtatttcttagagagatcatcattttatggtgccttgaaataaaaatacttctacttgaaatgctaaaaaaaaaaaaaaaaaa

SEQ ID NO: 62 - DNA, 1062 bp, Homo sapiens
atgggtatctttcccggaataatcctaatttttctaagggtgaagtttgcaacggcggccgtgattcaccagaaaagtaccactgtaagtcatgagatgtctggtctgaattggaaaccctttgtatatggcggccttgcctctatcgtggctgagtttgggactttccctgtggaccttaccaaaacacgacttcaggttcaaggccaaagcattgatgcccgtttcaaagagataaaatatagagggatgttccatgcgctgtttcgcatctgtaaagaggaaggtgtattggctctctattcaggaattgctcctgcgttgctaagacaagcatcatatggcaccattaaaattgggatttaccaaagcttgaagcgcttattcgtagaacgtttagaagatgaaactcttttaattaatatgatctgtggggtagtgtcaggagtgatatcttccactatagccaatcccaccgatgttctaaagattcgaatgcaggctcaaggaagcttgttccaagggagcatgattggaagctttatcgatatataccaacaagaaggcaccaggggtctgtggaggtgcttatgttcaaaagctgttaccggctgtgtgctgtggctcatgcctgtaatcccagcactttgggaggccaacgcgggtggatcacttgagggtgtggttccaactgctcagcgtgctgccatcgttgtaggagtagagctaccagtctatgatattactaagaagcatttaatattgtcaggaatgatgggcgatacaattttaactcacttcgtttccagctttacatgtggtttggctggggctctggcctccaacccggttgatgtggttcgaactcgcatgatgaaccagagggcaatcgtgggacatgtggatctctataagggcactgttgatggtattttaaagatgtggaaacatgagggcttttttgcactctataaaggattttggccaaactggcttcggcttggaccctggaacatcattttttttattacatacgagcagctaaagaggcttcaaatctaa

SEQ ID NO: 63 - DNA, 979 bp, Homo sapiens
aaaatataagccagggtattactggccacctgactctacagcgtcccacatgcgaacacaggctagacaagggaggagtttctcaaacggttttaatcggttctctccgcgtcacaagccatcgggtaaggcaacggaatgtgcgtggggtcccctgtggctccgcggtcacaatactgagcctggaattgctgttagcaaaatatacatttgtgtcaccataaaaaaccgcgccgccggccctcgggtctcacaacaggtataaaacaattataaatatttacacccttgttacacgcttttacggaaaggggatccgtaggagagcccccgggacaggacgcgggggcggtagaaagagcacagagaagacaggaggagcgcccgccttccgggtcccagcatcagaggcaggcaaaacacagaaatgagactttggtccaaaatttgaaggaagaaaaaaccctgaagtttgagagcaaggttgttctatggcgactgcacggtgaaggcgtaggtgtaaggcaaccggaggcgatgccagaggcggcgacaacggcccgccccttccctgaagctcaggggctctaagataggaccggggctccctgtgcctgacccactgggcggcccgacctgctctctggaaactgggtcctgcctgtgacttaattacgaagggaaaataccaatgagcgagtaagcaggcatagcagggataactacccacaagggagagtataagattacattcataccattgtatctgtctggctatgcaagagttcgttgagaagctagttctttttgcctattacttggaaccgcactgacacttttgctcaacggagacatgcggaaggccgaacgtagaatgcagttttaccagcgatgatgcaccgtccagtgcagaagggaacgctgggaaaggacgctggccggtgcagacaacaagtaaagcggttggttaacgccacag

SEQ ID NO: 64 - DNA, 715 bp, Homo sapiens
tctcgctggtgtgaccccctcaccccttggatcgccaggacaccccggggtggtggggtggctgcaggaagggaggttttttaaggcacaaggaagccaagtcgtggtcggggcgcccagctgcaggccccacgcccgacacaggccccaccaaggcatgggcccgagggtctggccccgggtgtggagggccgggaactcccgctgccacagtcaccaagagcctgagctgtccctgtcaccgcaggtgaggcaaggtgaactagatttaattttttttaaaaacaggtaaactgatttctctttaaaaaaataaaatctctggtctgctaaggtcacttcagctgtttttaaagatggctttctctggaatgatggaagttgtcgccaggggcccggcgtgtgggcctgtgactcagatggtggatctggagaaggagacccgagtgagtggttctccccaggttctggttgtgcaggtcaatgaaggcctggaccgcctccttcacgagcccatgtggatgagtggcaatcttgcagtcctttctggagaacttgaattctttgaagtacggcccaatatgtggaaaataagaacttgagattctttcttcgagacttaggggcgggattgttggagaagtggagtcttggcacagggcggaaatattttatcggaaattactcggagacccgacttcttggaagcggtgca

SEQ ID NO: 65 - DNA, 918 bp, Homo sapiens
ttctaatctttctctggggggaacaggccacagaactgtgttagaggtgaaccatcttaattactagttctattacctaattcagcttccttgtttggtctgctgtggatctgccttattgcatacgccatgcatcagataatggatgcatcagataatggtgttagacaaagcttcattgtgaacaacctaatgcattttagagaaacaatctcatcacattttttctagcctttcctacatttaaacttgctgttgcccaaattataattttttaaatgtctttggtgggcttctgttaattcacatgacttgagcttatagctatgtctactgcacagattgggtaatggaacactaaacttttatacttgaaaatgacagccttaaatgctcatatcagtcacaaatctaggatgtactgtcttgttgtatgtgagctttgtagagatttttaaaaatataagcatcaccttcccattgaagagtggagagagtctactggatgactggccaggaactttctctctgaatcggacatttggatgtcttctttcttccaagaaatggtggttcacattaaagtatcatggcttatgtatgctcaaatggaatcttatgttactttcttattaaatctggtctgcctattttagataacatgcacggcatgtcttcaccaatcacatatagctgagatgcacacatggataacgacatccacggtcatttcaaattccactgccttggggatctaagatatcggggggcaggcccaacattccgacctcactgtctaatcagtgagcaatgctccaaaacattgatgcccacggcacctccccgtgtcccaacgaacaaccccacaattccaacgcggccccccgattctccaccgctctgctcacttactaatag

SEQ ID NO: 66 - DNA, 1139 bp, Homo sapiens
ttttvttgtggactgagtttttttttttcctttacatcaaatatcctcaatggaagaggggatattgcacacaaatatcataaaagcactacatattactttcactggaaactaattttctacattagatatgactggataggatagaagtgatgcaggattataagacataataccatacacagctgcagactgaaacaaacaccattcagaacaagaaaaaggagtttaaagtgcttttcagckgggctcaagaccacttctttccagtcctggaaagaggggctgcatgcagtttaggaaaagcgtgtttttgaactgccacagggtgtcctcgaaagggcagcccggtcttgatgccactcctccatggctcctgttttggggagcyccaaacaagtccagaaaagctgcctattttttcccttccttttcagtttttgatgctgcctttaaaaatcaacttcatgaagtcacagattttttaacagtaaatagttttaataccaggtgaataacctaattgctttcaaagaaatgctcatccctaggctgcttttggtgtattgttcagttggttaaaagataaaagcttacagtccctttcaaatggaaacaggatcttttcttctaaatctgaagcacaaaaaaaaaaagttattatcctaactcacaatatcattactgagcaggaacctcctgtaamaggtgahtaaagaraggaaagaaaagcaaattcagaattgtagagcagcycctaagagctgaaatttggtaacagagggaaaatgaaaggkggtaagatttccattagcaaatgattaaatcttaattaaatgagttttggaaagctcctagactgcataagctattggagaaactwaaaacatttatatacactggggaaccatttactatkawatgtaacgttaagaaaaaaaatttttttgaactcatgggaaatggtgtttaaagagggggagggggggaagttagttattgtwtccagtcccccacaagacttaaaaagcatgccagggctcagggttttgagaaggggaaagattggttaaaattgaaatggaggatmacgctaaattwakytytttgattttgttwagatacacmaaaaggtatga

SEQ ID NO: 67 - DNA, 574 bp, Homo sapiens
ttttttaagatttaatgctttattgctcttgatggcaaatcaaaatatgctttagaaataaagttaatttactggaaaataggagtttttgcaccaaaccataaaattgcatttcattacatcaagagaaccccctcattgtctacaatcatgcccgcttcctttcccctcagcgcccgggacacgtgaccgagatcataccctaaattcctgatccttttgcagttgccacatactgtggcttttagtacatcataaaaaagtgctttcctgtggcctcagctgggaggccctggcgctggggctaaggggcccaaggcaccatccaaaggctgggaggaaagaacccaaacccaggccctcctcctgccctcaagcctttgacaggcaactcatttggcatgatctgttttggtgtgtttaaaacatacatttgcatgtgtctagtgtaaagcaacaagtttgaggaaataagtggaaggagagaggaagttccagttagatggttccactagtgtctactggtaattggcaaaactatgagtgttgctaacctgggctgagggcacctctg

SEQ ID NO: 68 - DNA, 524 bp, Homo sapiens
ctctgccagaaaaaacgtttaattccctcatgaccaaaacaaaaaagaactggcttcaacaactagctgggtctgtgctggcctccaagaccttgaatagcccaaatatggagaggttaggtaatgtggccatagtgggcgtgggatgagacatcatcagttcacgccaacacccgtggctttcctcagcagcccaggtttctccatttccccctctgggctctgaatttgtcctcctgtcccagactcatagcctcccctaaagggcagaaggtaccagtgaggctgaggctgaaggaacacccaaagactccaagatcggaggggagggcccactccctggagcctactgaccccctccagctggactgacagcctgccagggacaaagcaggaccctgaccacaggaccctcgggaatagcccctctactcttgctccccagggaactcccctggaagagggaccctcagcatttctgggagtccaggggcctgctgcccacaatccccaggtagcctcag

SEQ ID NO: 69 - DNA, 819 bp, Homo sapiens
tagttgatcagtccgtaatcaagaaaaaaaagtataaactttaataatgctgtgaacgtggtttccatatttattttctctgatgggtgactgcacatcagtcatcttgagtttatgctaactacttaggctggtcacgacacacacacacatacagagaagtcacacaggctgtaccgggctggctgttgcaaatgtacatgaattacacgggttgaagttgtttggcagctagttaacatatgccacccaatgacgggacacaatctggtcacacgctgcctctcctgcctgttgctgttctttacaaaggtccgtgtgtcgggctggcaaagtggcatcctgctggcatctctgtggtggccccggaatggtggagtgcccaggtcagcatctactctgggtcccattctcaactgctctggccttgacatcagagcttccggttccctgctggctcttctgcacactggatccatgccagtccaggccccctccaggcacacacctgaggcagactgagagcacaatggacgctgtcctgatgtgaactgtgcccagacacaggatggggggaagcgggagatgtgaccacaacaaccacacacaagctccgatctttacagatgggccctctgggactgctatatggggtggtgcccgagagacacgggggccatgtggagcccaccaggcacagttgctgggaagaggacagacaggaggggacctgtgcccagtgcctgacctgaaagcaaagccaaaaagggtgaaggggaacgtgttcgaacaggtgcctaatgttgaaaagtcagacta

SEQ ID NO: 70 - DNA, 572 bp, Homo sapiens
  misc_feature (1)..(572): n = a,c,t, or g
caggcttgttgatgcattttattgtgagatgggagtctggtaaaaaactagaaaatgaccatgatgtaacaaggaacttaaaaatgaagagtcagatctgtaacttacatacatgaatacaggaacaaattggcacaaaatgttaaacattgttcccaacactgtttatagaagttaatcctaatttggcttactaaggaaatgagagttgtatggttaggctgatttctttaataaaactgcagagcatcatgctattagtcacacagtgaatttcaaaatttaagttttatattaaaaactgggtaaaggtaaaatgacttgattgtagttgtaaaactaatacattcccatttaagttctgttctacagtccaaggcaagtataaatgttaacataacactgttaaatcaaatctcaatgcaggagaaccaattgcatctctactttaaatcttatcaactttccaaattttcatactaaaatatattattgtattaatacaaactacagtattatacactacactgtgtaataaataaagaaatatanaaataagacacataaatata

SEQ ID NO: 71 - DNA, 642 bp, Homo sapiens
  misc_feature (1)..(642): n = a,c,t, or g
gggtttttttgaagcttttataaatgaggttaaacaaatgccaaattacggtgtgttagtacaagtctgtagcatctgtgtacagcaacatccatccaaaggcagaatcacagcctcgtatcggcctcgagtcttgagtcacattcatatcttaaaatacacgagtattccttttccgtctagtctcagttataggcagctacttcccagactctactttcacttctctctactttttcagacctggttcccatggcactagtgtagaaggttttagggtataagaagagggggcaataaggctaccctatcactatgacaaccaagaaggaggctggagcgtgaatccccaacgctgagggtggggagccatccctctctaccaaggtggcaatgatggagggaacttgcatggctaagcatccaggatgccatgcagcagacaccagggagcactgagccactgctggagcatttcctgcctctgccaggcggcctgcggaaagtgtttcacataactaaaaaaagtcaacacagtctcatgtatgcattaaaaaaaagctgtcnagtataaaaanccagacactggaagctgaaagacaagtgagtgtgagagccntctccaggcacacagtngagtgc

SEQ ID NO: 72 - DNA, 543 bp, Homo sapiens
  misc_feature (1)..(543): n = a,c,t, or g
catatgtacannnttcnntattaaaagtatggcactttatataacagcagaaataattacatgatttcacatccagaagcaataaaatgtggaggtgcaaacattccttattcccaataaaagtaaaaaagtttcaacatgttctgtaagcccttaattgcataaagtatatttagcatcatttacagccagtacacttatataaactaattatcattaccttttacattctgcaaaagaaatatgttaaagtaaagaagcatggcgagacaaacatgaattaaatgtcagttctgatcattcatggggaaatataagccgataattataaactactagataacacaatgattttaacaatttttgatgtttttaaagttaaaaaaactccactacatgccatattgaaagaaaaggttgttttttttttaactgcagcacctttagacaacaaaagattgcatcctgttcaaccacactatataaattataacatttgtggaaaatatgtacacacaaacataaagcaagtgttctaacagt

SEQ ID NO: 73 - DNA, 607 bp, Homo sapiens
  misc_feature (1)..(607): n = a,c,t, or g
ccaaacaagattatactcactcaaggcaagtgcaagatcttgaagtactagcagttaagtaatattgaattgtattgaatagttcacatagtntattctagtctttgaaaattactgaacatggacaatgtgcatgtcattgacatctgccttagaacttctgggacaatcctgattcgagagattctatcccattatttacatataccaaaaatactttgttaatttaatgtgttggcttcccaactcctgaacacgacacaattttattattagattttgtatggtgattttaggctatgaaaacatgatcattatatgtatatagatacatttttatttgttacaaatgtttgagcagctcactagcccacccctcctctattttgggtaagagaatttactaccttttttaactatgtagttgagagcaacatgtattttgttatttttagaatggtcagtatattgctataaaattttaaatgagcctatgaaagttaaagtattctgattctggttaaattaacgaatatggttccaggccctgttctctgggtttttgagagagaataaaggttatgtttgtcttaaaaaaaaaaaaaaa

SEQ ID NO: 74 - DNA, 1198 bp, Homo sapiens
ccggcaaagcccagctacaggcgggcgactgcggggggcccctgaggcggcgggggccatggctggggtcgcgtgcttgggaaaagctgccgacgcagatgaatggtgcgacagcggcctgggctccctgggtccggacgcagcggcccccggaggacctgggttgggcgcggagttgggcccggggctgtcgtgggctcccctcgtcttcggctacgtcactgaggatggggacacggcactgcacttggctgtgattcatcagcatgaacccttcctggattttcttctaggcttctcggccggcactgagtacatggacctgcagaatgacctaggccagacagccctgcacctggcagccatcctgggggagacatccacggtggagaagctgtacgcagcaggcgccgggctgtgtgtggcggagcgtaggggccacacggcgctgcacctggcctgccgtgtgggggcacacgcctgtgcccgtgccctgcttcagccccgcccccggcgccccagggaagcccccgacacctacctcgctcagggccctgaccgtactcccgacaccaaccatacccctgtcgccttgtaccccgattccgacttggagaaggaagaagaggagagtgaggaggactggaagctgcagctggaggctgaaaactacgagggccacaccccactccacgtggccgttatccacaaagatgtggagatggtccggctgctccgagatgctggagctgaccttgacaaaccggagcccacgtgcggccggagcccccttcatttggcagtggaggcccaggcagccgatgtgctggagcttctcctgagggcaggcgcgaaccctgctgcccgcatgtacggtggccgcaccccactcggcagtgccatgctccggcccaaccccatcctcgcccgcctcctccgtgcacacggagcccctgagcccgagggcgaggacgagaaatccggcccctgcagcagcagtagcgacagcgacagcggagacgagggcgatgaatacgacgacattgtggttcacagcagccgcagccaaacccggctgcctcccaccccagcctcaaaacctcttcctgacgacccccgccccgtgtgatttgtttcattgttaatataatttccagtttaataaacaaaaccctagttctgacaaccagaaaaaaaa

SEQ ID NO: 75 - DNA, 976 bp, Homo sapiens
  misc_feature (1)..(976): n = a,c,t, or g
cttcaatttgaaatcaccttttctaaaaagtcaattcatctagttaagtcgctgaacaattacctgccaaatgctatactgtgtcatggtgatgcaagtcactaaatttctcagtttttgctgattgctaagggaaataacagtatttccacaatagggttcaaattcctgcaaaattacctaccccagttcatctctgctgaacatttggaaaccatgcactagccaacccaactgacttctgctaggtagaggcatttgtcttagagagagagagagcgcgggagagagtgagagagagtgagagcacaaagataacgcaggagagagagagagaaagaatgagaaagaaaaggaatgcaagagaaggagatgtaatgacagagagttctggtgagatacccagagagaaaaagagagagcagggtggggtaaggaggagaaaataaaccaacaattaggtctgcattttctcaggcagtaggcattctttagtctacataggcaaagttttccattttgtcagtctgagtcatcaaaaagagtcttaattttctaaaacaagttggctagaagaaagtaaaaagaacaacacttgttatgaggggcctgtgatattttcacatcttagttaagctccttaagtttgaaggctgcacactgacataatgtagtgagtgtagactggccatgcaagtggttgggccccatttcagaaaatctcagactctaaaccaccagtgattgccctagcatgctccagaattgtcccgcacttagtcactctggttcgattactgttgcgaaaccagtcccccattatgacaatacccagcggggtctttggtaacatggccgagatgaatcaaaacgggcccttcgggcacgttaaacctgctactaaacaggatgggtaaaacactccaggcaaacaccagcgaaagattatatacaacggatgccttgaaaaaatanc

SEQ ID NO: 76 - DNA, 5726 bp, Homo sapiens
ctatgaggaagctatcaaatactatgaacaatatttatctgtcgtgcagagtctgaatcgcatgcaagaccaagccaaggcttaccggggcctgggaaatggacacagggcaatggggagcttgcagcaagcccttgtgtgctttgaaaagaggctcgtggttgctcatgaacttggagaggccttcaataaagcccaggcctatggagagctgggaagtctgcacagccaattagggaattacgaacaagccatttcctgccttgaacgccagctgaacattgctagagatatgaaagaccgagccctggagagtgacgcagcctgtggcctggggggcgtttaccagcagatgggggagtatgacacagccctgcagtaccaccagcttgatctacagatagcagaggaaaccaacaaccccacgtgccagggccgagcctatgggaacctgggcctgacttatgaatccctgggcaccttcgagagggctgtggtctatcaagaacagcacttgagcattgctgcacagatgaatgacttggcggccaagacggtgtcatatagtagccttggaaggacccatcatgccttgcagaactattcccaagcagtcatgtacttacaggaaggtttaaggttagctgagcaactgggccgaagagaagatgaggcaaaaattcgccatggccttggcctctccctttgggctagtggaaacttggaggaggcccaacaccagctttatagggcatcagccttgtttgaaacaatccgacatgaggcacagctgagcacggactacaaactctccctctttgacctgcagacatcatcctaccaggccttgcagcgggtgctcgtcagcctaggccatcatgatgaagccctggctgtggcagaaaggggacggacaagggcatttgctgatcttctggtggaacgacaaacaggacaacaagactccgacccctactccccagtcactattgatcagatcttagagatggtaaatggccagaggggactagtgctttactattccctggctgcaggctatctgtatagctggctgctggctcctggggcaggaattgtgaagtttcatgaacactacctgggtgagaacacagtggaaaactcaagtgacttccaggccagcagcagtgtaacccttccaacagcaaccggctcagccctggagcagcacattgccagtgtccgggaggccctgggggtggagtctcactactcaagggcctgtgccagcagtgagacagagagtgaagcgggagacatcatggaccagcaatttgaagagatgaacaacaaactcaactcggtcactgaccccactggctttctgcggatggttcgccgcaataacctgtttaacaggagctgccagagcatgacgagcctgttcagtaacactgtgtcaccgacccaggacgggacctcctctcttcccaggaggcagagctcgtttgccaagcccccgctccgtgccctgtatgacctgctcatcgcgcccatggaagggggcctgatgcactccagcggccccgtgggccggcaccggcagctcatcctggttctggagggggagctctacctcattcctttcgccctcctgaagggaagctcctccaatgagtacctctacgagcgcttcggcctccttgctgtcccttccatccgctccctcagcgtgcagtccaagtctcacttacggaagaacccgcccacatactccagctccacatccatggcggctgtcatcggcaaccccaagctaccatcggccgtgatggacaggtggctgtgggggcccatgccatcggccgaggaagaggcctacatggtgtccgagctgctgggctgccagcccctagtgggcagtgtggccaccaaggagagggtcatgagtgccctgacccaggctgaatgcgtccactttgccacccacatctcctggaagctgtcggccttggtcctcacgcccagcatggacggcaaccctgccagcagcaagagctccttcggccacccctacacgatccctgagtccttgcgggtgcaggacgatgccagtgatggggagagcatctcggactgcccgcccctgcaggagctgctgcttactgccgccgacgtcctggacctgcagctgcctgtgaagctggtggtgcttggctcctcccaggagtccaacagcaaagtcacagccgacggggtcatcgcgctgacaagggccttcctggctgccggcgctcagtgtgtcctcgtgtctctgtggcctgtgccagtggctgcttctaagatgttcatccatgccttctactcatccctgctgaacggcctgaaagccagcgccgccctgggggaggccatgaaggtggtgcagagcagcaaggccttctcgcacccctccaactgggcagggttcatgctcatcgggagtgacgttaagctgaacagcccctcatcactcatcggccaggccctcacagagatcctgcagcacccggagcgtgcgcgggacgccctgcgagtgctgctgcacctggtggagaaatccctgcagcgcatccagaatgggcagcgcaatgccatgtacacatcccagcagagtgtggagaacaaagtgggcggcatccctggctggcaggccctcctcaccgctgtgggcttccggctggaccccccaaccagtggcctgccagcggctgtcttcttcccaacctccgacccgggcgaccggctccagcagtgcagcagcacactccagtccctgctgggtctgcccaatcctgccctccaagccctttgcaaactcatcactgcctccgagacgggcgagcagctcatcagccgggctgttaaaaatatggttggaatgctccaccaggtgctggttcagctccaggctggcgagaaggagcaggacttggcatcagctcccattcaggtctccatcagcgtccagctgtggcggctcccgggatgccacgagttcctggcagctctaggttttgatctctgtgaagttggtcaggaggaagtaatcctgaaaaccgggaagcaagctaatcgacggactgtgcacttcgcgctccagtccctgctgtctctgtttgattctactgagctacccaagcgcctcagccttgacagctcctcctccctcgagtctcttgcttctgctcagtctgtttccaacgccctgcccttgggttaccagcaaccccccttctctcccaccggtgcggacagcatcgcctcagatgccatctctgtgtacagtctgagctccattgcctcctcaatgagctttgtctccaaacccgagggtggatcagagggtggaggccccggaggacggcaggaccatgaccggtccaagaacgcttacctgcagagatccaccctgcctaggagccagctgcctccccagacccgccctgcaggcaacaaagatgaagaagaatatgaagggttttctatcatcagtaacgagcccttggcgacctaccaagaaaaccgaaacacatgcttctcaccagaccacaaacaaccccaacctgggacagccggaggcatgagagtctcggtgagctccaaagggagcatcagcactccaaattctccagtgaaaatgactctgattcccagccccaactcacccttccaaaaggtgggaaaactagcaagctcagatacaggagaatcagaccagtctagcacagaaacggacagtaccgtgaaatcccaagaagaaagcaacccaaaactggatccacaagagttagcccagaaaattctggaggagacacagagtcatctcattgcggtggagcgtcttcagaggagcggcggccaggtgagcaagagtaataaccctgaagacggcgttcaggcgcccagcagcactgctgtcttcagagcgtcagaaaccagtgcgttcagcaggcctgttctctcccatcagaagagtcagccatcaccagtcactgttaaaccaaagcccccagccaggagctcctccctgcccaaggtgagttccggatatagcagccccaccacctcagagatgtccatcaaagacagcccgagccagcacagtggccggccatcgcccggctgcgactcacagacttcccagctggaccagcctctctttaaactgaagtaccccagctctccttacagcgctcacatttccaaatcaccaaggaacatgtccccaagctccggccaccagtctcctgctggcagtgcaccctccccagctctctcctactcctcagctggatctgctcgctcaagtccagcagacgctcccgacatagacaaactgaaaatggcagccattgatgaaaaggtgcaggctgtccataacctgaagatgttctggcagagcacaccccagcattccacagggccaatgaagatcttccggggggctcctggcacgatgacttccaaaagggatgtcctcagtctgctgaatttgtcaccacggcacaataagaaggaggagggagtggataagcttgaactgaaggagctgtccctgcagcagcatgacggagctccaccgaaagcccctcccaacggacactggcgcaccgagaccacctcgctgggctcactgccgctgcccgccggccctcccgccacagcccccgcgcgccctttgaggcttccttctggaaatggctacaagttcctgtctccaggaagatttttcccttcttccaaatgctaaagcatcttttatacccactgactctgagcagcctgcagatgggggcctggcgtttgcttcagcccttccctgagtgcagtccccccacagccaccagcaccctcatgatgctgtgctctgcaggcgaggggcaccaccacgtccaaaggctgccacacacactggtggcttttctgggccacattcaccaaaagccaggacttctgtggggctggtacaggaggctcatggaatttcctacacacttcaccaaatgtttgtttacctttgaactccctgcttctcatctttgatatgattcttcaccaggattttgtacaaaaatgatcatggttctggggtggggagaggaaagggagcacatattttgctaagaggtatatatgcagtaccttttatacacagaaatacaaatagagctttttctaaggctttcggttgctggttgggggtgggatatatgaaatttcagttgaattctacaggaaagtgttatattagccaaaaacagaaaaatggtttttaaaatgccaatgatttgtaattaaattgtagcaattttggtctcatgatagtgtaatatctcagcaacaatgcaataattcacattgaaacagcgcttccattctgaactctgctctgcaaatgtcttttgggtcccgctgtcaaccaaacttgaattttcttaaaaaaaaaattatgtaactcttatccaggcattttagaactatgcaattgtgatttaaaatgcaactttgtgcttttaaaacattattgaccttttttgtatatggataaacaacttttggttttattatcaatagtactttgcatttatagctattatttttaaaagctcaaaaagttttttaaaatgtcaaattttgaatagtcatcaataagtaattatcaagtttggaaggaaaggttgaaatgactccgtttccttataagc

SEQ ID NO: 77 - DNA, 43632 bp, Homo sapiens
gatcaacagcatcccaaggcagaagaatttttcttagtacagaacaaaatgaagtctcccatgtctacttctttctacacagacacagcaacaatctgatttctctatcttttccccacctttcccccttttctattccacaaaaccgccatcgtcatcatggcccgttctcaatgagctgttgggtacacctcccagacggggtggtggccgggcagaggggctcctcacttcccagaaggggcggccgggcagaggcaccccccatctcccggacggggcggcggcagggcggaggcggacccccacctccctccctgacgggccggctggctgggcaggggctgacccccacctccctcctggacggggcggctggccgggcgggggctaaccccccacctccctcccggacggagcggctggccgggcgggggctgactccccccacctccctcccggactgggcggctggccgggcgggggctgacccccacctccctccgggacggggcggctgctgggcggagacgctcctcacttcccagacggggcagctgccgggcggaggggctcctcacttctcagacggggcggctgccgggcggaggggctcctcacttctcagatgggacggccaggcagagacgctcctcacctcccagacagggtcgcggccgggtagaggcgctcctcacatcccagacggggtggcggggcagaggcgctccccgcatctcagacgatgggcggccgggcagagacgctcctcactttctagacggaatggcagccgggaagaggcgctcctcacttcccagattgggcagccgagcagaggggctcctcacatcccagacgatgggcggccaggcagagacgctcctcacttcccagacggggtggcggccgggcagaggctgcaatctcggcactttgggaggccaaggcaggcggctgggaggtggaggttgtagctagccaagatcgcgccactgcactccagcctgggaaacattgagcactgagtaaacgagactccgtctgcaatcccggcacctcgggaggccgaggctggcggaccactcgcggttaggagctggagaccagcccggccaacacagcgaaaccctgtgtttggtggagaccaaaaaaatacgaaaaccagtcaggcgtggcggcgcgcgcctgcaatcgcaggcactcggcaggctgaggcaggagaatcaggcagggaggttgcagtgagccgagagggcagcagtacagtccagctttggctcggcatcagagggagaccgtggaaagagagggagagggagaccgtggggagagggagagggagaccgtggggagaaggagagggagaggaggattgcattttttaaaaattggaggtaccattgatttaataacttttcagtcaaaaaagactacacaaaatacataaacttttatttatttttatttatttttactttttttttttttttgagatggcgtctcacttgttgccaaggctggagtgcagtggcgcaatctcagctcactacaagttccacctcccaggttcaagcaattctcctgcctcagcctcccaagtagctgggattacaggtgcctgccaccacgcacagctaatttttgtatttttagtagagacagggttttaccatgttggcctggctggtctcgaactcctgacctttagtgatccatccgtcttggcctcccactgcgcccggccataaacttttaaactaaagcatgatctatcgatacattgcagagcttctttcctttagtatctgaaggtttgagtcaaagctgttttcccatctggaatcagttgcccatttggctatccgcccgagcgttgtggtttcctctcctgttcctggcctgcctttgtgactcactctggagatcaccttcgaggttaatggcttgtggaagagttccaagttttatctctgtcctagttggttaaacatcattttctctttttcaagcaagtgaaaagctttcaatagatagatgtttatttcctaagcactaaatgactcataaattaagtccctgtagatttggaaaaactccttaaactgtatctagaggtctagcacttcctagtaggatagacagtcctttctagatactgtaacttttttctgtaccgctttggagtacagtctttatgaagttgtttgtaagcaaaagggaataaaatttaagcctaaaggctgggcgcgatggctcacatctgtaatcccaatgctttgggaggccaaggcaggtggatcacctgaggtcaggagttcaagaccagcctgaccaacatggtgaaaccccatctcaaaatacaaaaaattatctgggtgtggtggcggccgcctataatcccagctactctggaggccgaggcaggagaatcacttgaacccaggaggtggaagttgcagtgagccgagattgtgccattgcactccagcctgggcgcaacaaaaaactctatctcaaaaaaaaaaaaaaatttaagcctaaaattcaaccctgttactacaagtgacttacctgaagttgcagtctgctgaacaggtattttccatacacagctacgtttctctgtagacagcagtgacaattctgtttccgttcatgcctctgcctacctgctggcacatgtctttcaatagcagcagtatgctatatcctgatttcacaaatcttaaaatatgctaaaatgggtgtcttagacccaaggaactgtaagtcttctctggaggcctaaggctgctctgtcagtccccatatccccgggccaggccacgtgaagcaccaaatccactggggtcccttttgcccctacaggtctccctgtcttcctgcctctgtgtcagccaggagctcatcttctgtggctgcacagatgggatagtccgcatcttccaggcccatagcctgcactacctcgccaacctgcccaagccacactaccttggggtagacgtggcacagggcctggagcccaggtactgccctgtggggagagggaatgggaggggcccacccagagtctgtccactggcattcatccatgcttccagatccatctatctgtctgtccatcccacaaatacccatcatgactctcagccctgggcattacaaagcagaaaagtccttgccttccgaggcaagcctcacagtgagaagtgaggctgggtagggggaagaaacagtgagaaaacaaaggaataatatcatttcagatagcggtcagcatggtgaagaacagtgcagagcaggtgtgaatgtggcggagtgtttccatccacatggctgacccctactaagtggctgctaagtgccagccctgggctggaagcaggacatgcctattataatgaagcagcaaaatctctgcctctctgcagtatagcaagggggctcgatgataagcaagtacacgaaaaagataatttcaataggcatgagtgctttggggaacacagcagggactcgggaaggagagtgactggggtgggctgtgctgattgggtgcctggtgagaaggagctgctgtgtggagagctgggtcccagcagttgaggtgacagcacactgggcttgttacgttgcaggaatagtaagggactgtgtggccagagcccagtgtgtccggggaggatggtgggagatgaggccagtgtggggcgcctgtagtctatcctcaggtcagtgggcagttgctggggtttcgggcgttggggtaaatgaccaggccttacatgttaggtccctcagctgctgtgtcgagagtggatagaagcactaggctgtggctttcttctcctttgttgcaagtctgttttatggaattgggggctacctaaccagggggtgccaggtgcctagggctgcctctttgtggatttctggatgctagctcctgggtgccttttccacgacagggcctgaacaggggaactgggtgtcatgaaggaaaggagggggcgagcaacccacaggcagtgttgtgttgtagtagtcgggctcacagctctgctgtcttctgttgtgctctgtgaccttgggaaggtgactatacctccctgtgcttccgttttctcatgtgtaaaatacagtacctagctcttattgtggttgtgagaatttattgcaggtaaaactctcggcctggcacagtgtaaatgctcagtaaactgtagccttcatagggagaccccaggccaagggacagctccccagcctccttaggacacagaggctttttgatcatgcgttggtgaggccaagaagaggtgggacctgagatacatgcctattatctttctatgctcagagagagagcaggagcttgggttgggtgaaatgatgggcgataaatgttcataggaatcaaaaactcaattgctctcggggccaggcaaaaatttccggtttgtagcctctatatgaaaagcaaagcagaggaagagggaagagggaaaagtagaattggagcaggagagatggatggccacaaataccatgagggatggcattgccggggaggcatctccactgtcactagaggtggctgtcactactcagtgacattgatggtgattgattacccatgtggccttgttagcttcctcttccacaggaaggcggaagcagtctacccagatacagtggcactgaccttcgaccccatccaccagtggctgtcctgcgtgtataaggaccacagcatctacatctgggatgtcaaggacatcaacagagtgggcaaggtgtggtcagagctcttccacagctcctacgtttggaacgtggaggtgagccccccccccacccccttgcccctgcttggcctctgcacagttccccacagtttgggaacccattcagtaattccttcagaagatactcattgactccctcctatgcatcaggccctgtcctaggtgctgaggacacagacacaaaatccctgcccttaacaagctcacatttggatgggaaaggaaacctggaaacatcatcagtgaataacacgccaagcagcagtaaccctctgaagaaaaatgaggcggggaaggggaaggggaatgcaggtggtattctagagaggagaggggtcagggaaggcctccctgaggacatatgagcagagacctgcaggaaatcggggagtgagacctgcaactgctggggagaaccacaagcacagaggccctgcggcaggaacatgcactccacagagagctttgctgtggaggtcgtttatgtatttcactgctttttttaaaaaggagttgaagacggggcatggtggctcacacctgtaatcccaacactttgggaatctgaggcgggaggatcacttgagtccaggagtttgagaccagcctgggcaacacaagaccctgtctctacaaataatttttaaaaattagccaggcatggtagcacacacgtgtggtcccagctactcaagaggtggaggcaggaagatcacttgagcctgggatgtcaaggctgcagtgagctgtgattgtgccaccacactcccacactccagcctgggtaacagtgagaccatgtctaggaaaaaaaaaaaagttttgaagtttttattttctgagaatgaatttgtgggtttttaaaaattctctaaagttaaccaggcacagtggctcatgcctgtagtcccagcactttgggaaatcgaagtgggcagattgcttgagtccaggggttcgagatcagcctgggcaacatgaggaaaccccggctttacaaaaaatacataaaaattagccaggcgcgcctatagttgcagctactcggcaggggctgcggcaggggggctgaaaatttcttactgggaatgtttgtcctagagaaattgggttttcagtggccagattcaggatcgtgagaaagaactttgtccttttgaataggcagcattcagcctatgactctggttgaatctgtctgccttcatggggctgacgtttttgttgacagcactttttttccactcaaagaatgttttttaataacttttaaaattcctgtatgaaatttttaaaaatttgggataataggtgaaatattacagataaggctacagtccacattgatgacttccctgcccccagttctgctctctctcgccctcaccattatcaattttattatgggtgtcttcagttgattttctttgcatctccttattgtttatgtatatagctgttcaacaacagtatctgtggatagatcttttcatcagttctagaaaattctcagccaatactgcttctaccctcttctctctctttttttttttcagacggagtttcactcttgttgcccaggctggagtgcaatggtgtgatctcggttcactgcatcctccgcctcccgggttcaagtgattctcctgcctcggcctctcaggtagctgggattccaggcatgcgccaccacgccttgctaattttgtatttttagtagagacggggtttctccttgttggtcaggctggtcttgaactcccgacctcaggtgatccgcctgccttggcctcccaaagtgctgggattacaggcatgagccaccatgcccggcctattcgctctcttctaaggttctatctaactctaaggttctatctgtattcttcatgtttctgaaaataaaaatcacacaaaagatatgtagagtttatcaattattgttagcagctttttttcccccccaagacggaatctggctgtgttgcccagtctggagtgcaatggcacaatctaagctcactgcaacctccagctcctgcgttcaaacaattctcctgcctcagcctcccgagtagctgggattacaggcagccgccaccacgcctggctaatttttgtgtttttagtagagatggggtttaaccatgttggccaggctagtttcaaacccctgacctcaagtgatctgcctgcctcggcctcccaaagtgctgggattacaggcgtgagccactgtgcctggcctgttagcagctattgatgctcagttcctggacccttttatttattgagggttgcaatatggtgatattctaaatctataatttatttttattagttggactacttacgtgaagagatatttgctctcatctgccatttggtcacccagtgctatacttcatataggaaaggcaggagaaatacttgattctttccctttatttaccagttttcaagataatgaattggttccctatcctctaaaggtaactagttttatttaatatcattataaactcatatatatttaaatatatcagatatgttttaatctattgtaattattaactttattggagctcatatcatcccatctttggccagtgagagcctcttaacattggctcctgagccctttggacatgaccctagtatttcttgatagccaccttgctgcctgggatgccaatatgttccagtctcatcttgtacatttcctgtcacacatcaggaatcaaccatttctcgaaaagaccatgtttttttttttgggctgggtgcagtggctcatgcctgtaatcccagcactttggaaggctggggcaggggaattacccgagcccacgagtttgagaccaacctggccaacatggtgaaaccttgtctccactaaaatacaaaaaattagccgggcatggtggcaggcgcctgtagtcctagctacttgggaggctgaggcatgagaattgcttgaacccgggaggcagaggttgcagtaagccaagatcaagccactgcactccaatctgggtgacagagggagatcctatctcaaaaaaaaaaaaaagaaaaaagagaaagagaaggccagggtttttttttagtacaaattgggacttcagaatcacaggttgggtgttagggatgctcatcgctattgggtcgttcttccagaagcctagttcttaaggacacaggggatggtggaattagaatatccccagtaactcatttgctttttcccacattatacatgcaacagtctgagaatggacaacttttcaattctgaagatagttaaaacaattgtaatgcatatgttctctctgttctctccaatttttaaaatagttatactatatttacaggatctgaatatgtagccattatatactatagtgtctcccttttgacccctgtttattttggaatggggaattatatatgtgtgtatatatgtatgtgtgtgtgtgtatatatatatataaaatgataaaatatacatgacatcaagttcaccatttcaactattttaaattgtaccatttggtggcatttagtacacttacagtgtcatgcagccatcattactctctagtttcagaacattttcatcacccacccaccccaaaaaatcctgtatctgttaagcagtcctccccattccccactccccccatccatggaaatgactaatctgcttctgtctttatggatttgcctgttctgaatcttttcttttctctccttctttccttccttccttccttcctttttttttttttttttttgagatggagtctcactctgtcgcccaggctggagtgatgcagtggcacgatctcggctcactgcaagctccgcctcccgggttcacgccattcttcttcctcagcgtcctgagcagctgagactacaggcacacgccaccacacccagctaattttttgtatttttagtagagacgaggtttcaccatgttagccaggatggtctcgatctcctgacctcgtgatccgcccacctcagcctcccaaagtggtgggattacaggcatgagccaccatgccaggctgtttcctttcttttcctctttctttcttttttttttggatggagtctcgctttgtcacccagactggaatacagaggcacaatctcggctcactgcaacctccacctcccgagttaagctattcccatgcttcagtctctagagtagctgggattacaggcacatgccaccatgcctgatgaattttttgtattttagtagagacagggtttcaccatgttgcccaggctggtttcaaactcctgagctcaggtgatctgcccgcctcagcctcccaaagtgctaggattacaggcgtgagccaccatgcctgacctgaatattccttataagtgaaatcatagactatgtgggcttttgtgcctggctttcacttagcataatgttttcaagatttatccatgttgtagcatgtgtcagcacttcatgcctttttatggtggaataatatttcattgtacggatagaacacattttgttctctgttatcagttgacggccacttgggtttttttctaccttatggctgttgcgaataccactgctatgaacatgtaagtacaagtttttttgtttttttttttttgaaacggagtctcactctgtcgcccaggctggggtgcagtggtatgatctccgctcactgcaacctcaggctcccaggttcaagcgattcttctgcctcagactcctgagtagctgggattacaggcacgcaccaccatgcctggctaatttttgtttttttagtggagacacggtttcgccgtgttggccaggttggtctcaaactcctcgcctcaagtgatttgcccacctcggcctcccaaagtgcagggattacaggcgtgagccactgtgcctgacgtagttctttctttcagttacatcactttgtttctgagtttttgtaggttgtttttcataccttggatcattttttaaatatcttttaccttcttttgaaacagtaggcccagcgtggtggctcacgtcggtaatcccaacactttgggaggccgaggcaggtggatcacctgaggtcaggagtttgagaccagcctggccaacatggcaaaaccctgtctctgctaaaaatacaaaaaattagctggccgtggtggcgggcgcctgtaatcccagctacttggggggctgaggcaggagaattgcttgaacccgggaggcagaggttgcagtgagccaagatcgtgccattgcactccagcctgggcgacagggcgagactctgtcaaaaaaaaaaaaaaaaacaaagtaagttatagtttttatctttttttgtgaaaatatgtttctgctgtgcttttttttttttttcttttttaagagtaactattggatttgaccttggtcctttcctgttgttcatttttatgtgataccagtttttctgaaattttagaagttggtgtgcttcaggacagattttccaactacacaagaagaactctgtcttttcttttttttgtgggggtggggtggcatgttttgttttgtttttgaaaaggagtctcactgttacctaggctggagtgcagtggcatgatcacagctcactgaagcctcaacctcataggcacaagcagttctcctgcctcagcctcccgagtagctgggaccacaggcatgcactaccatgcccagctaattttttatttttggtagagatgggatctcattatactgcccaggcttgtttcaaacttgggctcaagcagtcctcctgcctcagcctcccaaagtgctgggattgcaggcttctgttatttttatactgtgttaaaatatggcagcctgctttctgatacttcctttttgtggtcctctttatctgttatgtctcttctttcgtctcaatctcctctttactttatttcttctgtccctgttgtgattggtcaatttcatttctactcttagcagtttctcttcagtgtggagctttgtcctggaaggacaaagttcacaggatcttctccagtccctttaggccttaccccttgcactcaactgctgttggggtggatgaaaccctcctactttcagctgctgttcagtttggcccagtgtgctttccaatgaacacctcttggctactttggaattatcctgttgctgggtctgtcagatgccttattacttctctgtctcccacatgcatgctgatgatatgtaggtcttgtgattggtggtggtttgtcccactcacttgtattttggggtttatgggagtattttgtcactgagttttgctataaatgttgtctgtaggtttgggttttgctatctggttgatgtttttcttatgtcgagattttgggagattaaaaaaattaatgccgctactatcatcttcccagttctcaatcttccgtattttgaaatctctttatatggtggctctttgtccttctcagcttcattctaaatatctttagttttgtctttcagttcacttaattttctcctcagttatatctaatctttggtttttaatgtttttatttttttattattttttttttgagacggagtctccctctgccgcccaggctggagtgcagtggcgtgatctcggctcactgcaagctccgcctcccaggttcacgccattctcctgcctcagcctcctgagtagctgggactacaggtgcctgccaccacgcccggctaattttttgtattttttttttttagtagagacggggtttcaccgtgttagtcaagatggtctcgatctcctgacctcgtgatcctcccgcctcggcctcccgaagtgctgggattacaggcgggagccaccatgcccggcctattttttatttttttatttttatttttttgagatggagtttcgctcttgttacccagactggagtgcaatggcgcgatcttggctcactgcaacctccgcctcccaggttcaagcaattctgctgcctcagcctcccaggttcaagcaattctgctgcctcagcctcccgagtagctgggattacaggtgtgcaccaccacgcccagctaattgtgtatttttagtagagacggggtttctccatgttgaggctggtctcaaactcctgacctcaggtgatccgcccacctcagcctcccaaagtgctgagattacaggcatgagccaccgcgcccggccaatatgtttttattattcatttctagaagctgttctgttttggtctttttcagccctgcttggttaatctttataatttctggttggctgcacacttttaatcttgtcaaaattatcttttagttcttcaaacatattgaatgtagttattttatattctgtctgataattccaatttgggtttttttattttgtttttggtttgtctgtctgtttgttttgagacacagtctcatatgttggccagagtagacttgaactgctggtctctagcagtcctcctgcctcagcctcccaagtagctgggactacaggcatgcgccacctcccctgatttaataattccagtatttaaagtcttgctagactctgttgcttctgctgcttcttgctgatggtacctcgttttcttttgtgcttagtcatgtttgattgagttccacatttcccttggaagtttatttgagggtatgtgttaaggcctaggctgaaggtgggacatggatgatatatggtagcattttgtgtcctttttttttcttgtttatttttagcatagaaggtattgcacgatacctgtttatctttaacttactttttttttttccatgaaaatgcaacagtaagtcatagtgctgtcattgagtcatcctttgccttgtcctctgggaactgtaggtgtatcctgagtttgaagaccagagagcttgtttgccatcaggatcctttctgacttgttcttcagacaacaccattcgcttctggaacttggacagcagccctgattctcactggcagaaaaacatcttcagcaatgtgagtggcttcctttgtgaaccatctttcaggaggaacaaagacctactgtaagcttgaatgcaggggcaggagagagtctgatggaccctagatgttaggttccatgagggcaagagccggcaaccaaggcaggtccctctctgcatcactgcctcttgtttctctttctcctgccccctctctgaggtggcacgctctatcctctctgattctttgccagttggctcctgctctgcagatgtgtggacgtggccactcccggcagcccaacacacccagcccaggtgaaattgcttcctaagtcttgagatggaattccctgggagagcacctgatgagccagcccattcagctgccacacagtgaggcctcacgggggtatgggcagaatgctggcgagagccatgatgggaggctgggaagaaaagtttgctgaggaaattttggttagtattgcaagcccagtgagagggcgtctctggggagctgagacctgagtcatgcattcatttattctgcagacacttattaacgtccatgccaggtgcttggctacatgctagggacacaacagtgactaagactcttctgtcctgtggcacacacaatctagtgagggccgacagtgaactgacagccgaccatgttaatgcacaatcacaagtgcgaaaagcactgtgaaggaaaatgtgcagggtgctagtaggacatagagcagcagcatgtgaacttatctgggacatccggagcagcttcccgcggaagggacagctaagttgagattgggaagagtaaagagggaaggggagagggtctatacttagggaatagcctgtatgaaggccctggggtgggaaacagctgggtgaattggaaaacctgaaagaggccagtgtgattggaactaaaaagaccctccatgcaggaggctgtagcaggtgccctgcaggtgcacctttattactcccctcattccctacccagtgctaccatcgtctcctctgtacctgtgacatacatgctgtttttggctgcacacaatagaaaaactcaaaacaagaggtaaaagttaggtttctgactcatgaaagtagtctgaaggtaaccagtttagaccgttctgcaggaagcccttagggatccaagggccttccagctctctactctgtcatttgagggagcaggctatgtcctcatgacccagtgtggctatgggggctcctgctatcatatctgagttccaggctgcaggatggagaaaagacagcagaagaatacgtgcttgctttatatttaatagttcagaatttattcacatattcttatctagctgcaggggaggcaaggaaataattattctgattggtgaaactcccagctcaaaattagagttgtattactaacgaagaagagactggctatggagggacacgatttcagaggtgcttctgagctgctcgtgctgacctcagccctgtccttcctgcagaccctgctgaaggtcgtgtacgtggagaatgacatccagcacctgcaggacatgtcacacttcccagaccgggggagcgagaatgggacacccatggacgtgaaagccggggtgcgggtcatgcaggtcagtcctgacggccagcatttggcttcaggcgaccgaagtggaaatctgaggcaagtgggccctggcagtgtccagtgtacacctcccagctccagctcaggttctcagggcagtgggcagaagccctggccttggcacctcctgctgcccattgggaatgaggggctgtgaatagtaatcccatgaacagctcccattgggaacttaagctcgtaagaggcttccagaagggctgagagcagagtaactaccaggacctcagcagctagggtgtgcagattttgcctatagagtgtacaggcaagctcacatgactctagggcagcgtgacactttcaccagccacatggtaccagtgctgaactgtcaccgaagatgccagctggaggagggtcctggtggctctgggagaggggctatgagggtgggatagctgagagttcaggctgcttatgtgccctgttgaggtttggcaggatgttaccaacccagtaggtgctagtgggacataggccctgttgctgggaccaggtttaagatgacaaatgacagctgtgaccacctgggtattggagccactggggaatggaggagagttgggggaaactagaggggacataaaggggcagcagccaccaggcagccccaggagagtaggctacaagttttcaaactttcctgttgtcaagaagagcagaaagtgccgatttttttctgtgaaattcgataatttttaaatattggcacctgttttgatatcagtcactgtatgagaccagctcagtgtgtcagtgagctgcttacattgacatggcactgtctggagtggcaaaacggtaccaagagccaacatggggatagtgctcttcccccttggtgggcgctggcctgagcactgtgttgactgatttaatcctctcactgacccctgatgtaagtgatgttattggcacaaggtgtctggagtaagatcacacgggtagaatgaagaagctgggatgactcgatgactgatttcatttggggagaatcaggaaggtctagatttgagactcttttaacaatgagagactggaatcaaatgttctcatccatagctcctatcctggactatgacctctggcccctagcccctggcccctgtcctaccccagggaccacctctgatgcagccctacgtaaacacctgcccccctagaagactgtcctagatccctggggctctgttctggcccaggcaccacaaggggctgctgcctgctgaggtgctccctggttcaacacggctccctttacgatggcaggtttctaaatgagaaaagtggttgtgcatgtctagagtatttggccatgataaggggttctcattgttggtggcctggccattctgacctattctagaagtggtagagcacatggggctggggtgtggggcttcagcgggcggtgtgtgtctcccaggatccacgagctgcacttcatggacgagctggtcaaggtggaggcccatgatgctgaggtgctgtgcctggagtactccaagccagagacgggtgagcccgcagcaggggtggaatgggggtcaggcagggaggcagcccccctggcagggccacagaaaggggtagttggtgtctggtgggactgtggatgacagctgggagttttgtgttcggtaagggcccctgtagctggaccctgagaccagagtggctgggacttcagaaagcaagacacccgcaggcaggactcagcttgacttgcccgctgctggtgccagcacccaagccaaaggggtggatgtatgaatgagtgaattgtgaatgagaagatagattgattgttaggcattattttcaaaaagtttgaagcctatagaaatattgggagaatattataatgaacaccccataggcttcacccaaattcctcaattttttttttgagatggagtcttgctgtcacccaggctagaggggagtggcaccatctctgctgactgcagcctccacctctctggttcaagtgattctcgtgcctcagtctcccatgtagctgggattacaggtgcctgctgccatgcctggccaatttttgtatttttagtagagatggggtttcaccatgttggccaggttggtctcaaactcctgacctcaggtgatccgcccgccttggcctcccaaagcgctgggattagggcatgagccaccacacctgacctttttttttttttttttttttttgagacaagagtctcactctgtcgccctggccggagggcaatgacgcgatctcagttcactgcaacttccgcctcccaggttgaagcgattcccctgcgttcaagcgattctcctgcctcagcctctcgagagtagctgggattacaggcacgcccccaccacacccggctaatttttgtatttttagtacagacggggtttcaccatgttagcctaggctgaaggctaggaccatagtagggtctccagacctcatggtcctcttcattaaaacaacagaaaattccttctgggccatcagatgagatcatgagataggagaagatttccaagtgaagatttcgtttgtttcaagacagagtcttgctctgtcacccagatgatatatggatgatatatggtagcattttgtgtcctttttcttgtttatttttagcatagaaggtattgcacgatgctggtctcaaactcctgacgtcaggtgatccacccgccttggcctcccaaaatgctgggattacaagcgtgaaccaccatgcccggctcctcaagatgttttctaggctgggcacggtggctcatgcctgtaatcccagcactttgggagttacagagttggtggagttatatcctgatgtgattttccccatgttcttctttcgttctctcatcccccatgctgtgtgccccaccaacttgtcttgaaacatatcttcactcggttcgcctctcctgatctcccctctgcctcaggtcatgttattaggcctcagacatagcaagtgaccagagtagggaaggctggtggcagatgggagtctggccacaggcagtcaataggacctgaacaaggcccaggtagccagacctcagagggtgagaggacactggttttggaagaggctgagaggttgccagggctttacccagcacagacccagcaggcaagagcgctgggctctgctggggcgtctgctgtggatgtccctggaggagcgtccatgcgcccatcgagactcatcctccctgagctggtggtgaggaggtgaaatgccagggtgtgggggctctgggaaagaccacacagagctaagggagtggcccttgccaggcttgggccaagttggctacagttgaagaaccaaagaccccttctccgaggactgggcagcttggtcacactgcccttctgggaggccagggcacccacgcagccttcaggaaccagtctcattctctcctctcacagggctgaccttgctggcctcagccagtcgggaccggctgatccatgtgctgaacgtggagaagaactacaacctggagcagacgctggatgaccactcctcctccatcaccgccatcaagttcgctggtgagcccctttcttcccgctccctgcgccttgctagctaccctgctaaaaaaggattcattctttcaactctcctgtaaaatatatatccaaacaagtgaatacagtatctgtgtacagtatacagaataatgactggggccgggtgtaatggctcacacctgtaatcccaacactttgggaggccaaggagggtggatcacctgaggtcaggagttcgggaccttcctagacaacatggtgaaaccccgtctctactaaaaatacaaaaatttgctgggcggggtgttgtttctgtaatcccagctactcaggaggccgaggtgggagaattgcttgaacctgggaggtggaggctgcactccagcctaggcaacagagtgagaccctgtctcaaaaaaaaaagaataatggccaggtaccatggctcacacctgtaatctcagcactttgggaggccaaggcaggtagatcatgaggtcaggagttcgagaccagtctggccaacatagtgaaaccccatctctactaaaaatacaaaaaaattagccaggcatggtggtgtgcacctgtaatcccagctactcgggaggctgaggcaggagaattgtgtgaacccgggaggcggaggttgcagtgagccaagattgcgccagtgactccactccagcttgggtgacaatgcgagactttgtctcaaaaaaaaaaaaaagaagaatataggccgggcgtggtggctcatgcttgtcatcccagcactttgggaggctgaggcaggcagatcacctgaagctaggagtttaagaccagcctggccaacatagtgaaaccccgtctctactaaaaattcaaaaaaagtaaccgggcatggtggtgcacacctgtaatcccagctacttgggaggctgaggcaggagaatagcttgaatccaggaggccaaggttgcagtgagccaaaattgtttcactgcactccagtctgggtaacaagagcaaaactccatctcaaaaaaaataaaaataaaaaataagctgggcgtggtggccgaagtgagtatccacagttcttaggagcaaggtttgaactaggacgttgttgatagcagagactgttctaattgctcatggtcgtaatattgttaaatacggtacttggattcaccacgtgcaggttaagaagcagaacattaccagaggcttgcaggccttctctgggtccctcccaggttacccttcctcccttatatggggctcactcccttctgtgagccaatgactcctccttgagcaacatctaatacttgtatgtcaggcctggaccctctcaaatgtcctgtcatgaaggagcatgtgtgatgtgcccagactcagagttttatatttgttctgtcatttcatcctcaccaaactgttattctgtaaagaaatgagacggccgggggcatctcacgccattgcactccagcctgggcaacaagagcgaaactctgtctcaaaaaaaaagaaatgagaataataaaagcaagaatgtttctaatgcttaccatgtggcagtccctgttccaagggcttcacatcactctccagagaaggaactgtcaccatgcccattgtacggaccggaagttgaggctcaaaggggaggcccaggttcagagcagtgtttaacagctttgaccttggcaccagagaatgcctgggttcagtcctgcccctgtcctctctgtgtgccttgggacaaggactctgtgaacctctgtgttcatgcttgtccagtgggatgggtggtgagcattcaggaagacccgctacatgcatggggcctggcccaaggctcatgtggatcttgcagttgatcctgatggcacgagcctcccagcctgtctccactggtcgctgctgcagtcctgcctctactccgctactcaagtcacctatctcaatcccagactggagagggtgtcccttctttgtccccagcctttgtttctctatatgcccttgctctgcagagcctgccttggccacagctccacctgtgccccctcacacgtacagctcataccttacagagtcccacccagacccagcacccacctcaccacctttaggaagccttgatcccagcacagttgattgatggctcttgcagtggagttccccagctagggtcccctgcccatgtggcccagccctgcctaacacacagcgtcctcctcccctaggcaacagagacatccagatgatcagctgtggggctgacaagagcatctactttcgcagtgcccagcaggtagggtggcatggcctccttgggggctggggtggggggttgtcggggcattctctgaaggtcctgccggccctgccagggttcggatggactacactttgtccgtacccaccacgtagcagagaaaaccaccttgtatgacatggacattgacatcacccagaagtacgtggccgtggcctgccaggaccgcaatgtgaggtaaggggtggccctggacccttagctggcctggtctgccttgtcctaggctgtctgctttcctccctctgttcctctggtccccaagaagctgggaaggaattgagggacccagcaggtgttccttcttggtttttttttgtttttgtttttgaggcagagtcttgctctgttgcccatgctagagtgcagtggcaccattttagctcactgcaacctccacctcctgggttcaagtgattctcctgcctcagcctcccaagtagctggaattacaggcgcctgccaccatgcctagctaattttttgtatttttagtagagacgaggtttcgccatgttggccaggctggtctcgaactcctgacctcaggtgatattgcccacctcagcctcccaaagtgctgggattacaggcgtgagccaccgtgcccggccaccagcaggtatttcttagaagctgggctctcccaagcctggcctccaggtcagcagagggctttcttctggctctccctagagccggtgtgggatgactaaggtgctgatgtggcacataaactccctcattcacccgtattccctgagcacctaactgggctggatggtgctgggatcatggcagtggccaggatagccccaggccctccttcatggagctcacagtccagtagaatggacacggccacctcacagccacagacagtgacagagtggtcagagatgggggagcccaggggccctgtggagacacctgaccccacctgcggatcaagcaggacttcctggaggaagagacaccttagcctggggaggatgtggaggagcgagccagggggaggcagagagtgagtgtgcagagggcaaagcagtgcaaagaggctctgcaccccttcccagttctttctcatgcggtgccaagcactgagcttgcagtgtgtgggggagatgaacattaactcagtggataccccaggacaacctcagcttgagatggggtttcagtttcagtctaggcatcagatggggacaagaggtagcagggggcttccaggggaggggaggacagcaagagccagagaatgaggtggtggggtaggcggggccctgttggccgcaacatgcccctacttccccagagtctacaacactgtgaacgggaagcagaagaagtgctacaagggctcccagggtgacgaagggtccttgctgaaggtgaggagttggagacccctgtctgtctgctgccctgatgggccacctattgtgacggcccacacctgagacctgtgcccttggtccttcctcagtgcaccgcgctgcccagcaccttctcaggcctggttaaacaaggatgcttgcgagagggtggggagggtgaccccagctgtgtttcctttatttacagagcccttccccaagtggggcgtctaagtgggttccattttgagtggcagcagggtatggtgggaagaatcagaggcatgaactcccctcctggtttgcccacaccagccacgggtcactcaggacaaggggggaccttctcagagcctctggtctaggacagttatgggttcaggttctgcctcaggctgactgtgtgaccttgggcaagcatcatctcttgaaatgcacacagacagcttgtctcatagacttgttctctggaggagttcagtttgcacatgttcagtgcttagcacagggcctggctactgttgttactgctgcggtggttgttaatttcttcacgtgtcgaatgggagcgggagctcctgccctgccagagtcccatgtgctgtgcatgcagcacgggggagggaggggcccaggcctcatcataaggaagaagcaggcagctggagtgacatgtgggtccctttcctggcaggtccatgtggacccctcaggcaccttcctggccaccagctgctctgacaaaagcatctcagtgattgacttttactcgggcgagtgcattgccaagatgtttggccattcaggtgggtgtgcctctctgcttgggatgcctccccacccgcccacaccctctgactccgaaggcaagtgcagcctctctgctttgtttgcagaaattattaccagcatgaagttcacctatgactgtcatcacttgatcacagtatctggagacaggtgggacatggacctttgggagagttgtggctcagataccatgagcactgcactcagcctgcctgtgtagagagcatttctaaactgcccagtttggattgtgggagtcttggtgtcacacccagccctgagttcaaataccagctctaagctgggcatgatggctcacgcctgtaaccccagcactttgggacgctgaggcgggtggatcacttgagctcaggagttcgagaccagcctgggcaacatagcaaaaccctatctctacaaaaaattagccgggtgtggtcatgtacacctctagtcccagctactcaggagggggaagatggcttgaacctggtaggtagaggttgcagggagcacagatcatgccagtgcattccagccttggtgacagagcaagaccccgtctcaaaaaaaaaacaaaacactaaaaaaacatatcccagctctgccatttattttcttgtcaccttgagcaggttatttcccctgagcctcagtttgctcccctgtaaaagacaccaccgtttacatttaccttaaaaatggtgtgatgaggccgggcgcagtggctcacgcctgtgatcccagcactttgggaggcctaggtggatggatcatctgaggtcaggagttcaagaccagcctggtcaacatggagaaactgtgtctctactaaaaatacaaaaattagctgtgcgtggtggcaggcgcctgtagtcccagctacttgggaggctgaggcatgagaatgacctgaacctgggaggtagaagttgcagtgagctgagatcgcgtcactgcaccctagcctgggtgacagagcaagactctctcaaaaaaaaaaaaaaaagaaaattgtatggtgagaaatgaatgagatgatatacatacattctttagcacatgggtggtactcaaggaagtcccttttgtcactccctttgatttaccccagttcttccccacagcccccttcctcaggtcttgaggcctccagaacaggccctggtttgctgggatgccccagacctgggcccagggtgtggatgtggcaagtccagcacccctgcactaagcggataggggtgtgttttccaggagcatctggagaatggggtccaggctgtggtgtgggtggcttcagggtcagccacggcagcggctcccatgcttactcttcctctgccttgtgtgtctctctttgacctccgcagctgcgtgttcatctggcacctgggcccggagatcaccaactgcatgaagcagcacttgctggagattgaccaccggcagcagcagcagcacacaaatgacaagaagcggagtggccaccccaggtcctggcagcccctgcctgtccaccagagggatgagtccctgccagggccccatggagtgatgctggggacacagtggtggccaagacagccctaggccctgcccttagcacactcacagctgagtaggggagacagactttgaatatgcagttacagtaatagatacaaaaaggttttgtggatttttttaattttcgtaaataatagagacagagtcttgctgtgttgcccaggcttgtcttgaactcctgggcccaagtgatcctcccaccttggcctcacaaagtgctgggatcacaggtgtgagccactgcacccggctatgagaagggtattaaagtggaaaagcaaagtgtttggcgagcctctcagcactgtgatgggggatgccccaagcggctgtgggaacagagcagtccctgaccggccagccaaggggaggggtgggtagacaggggatctgaggggagggctgcagtggggccacgtgtcctcttactcccacgtgaaagctgtagcttcacttacttctttgaatcttctaaatatatttctttcaagtctttatgtagcaaagccaattttatttgcagagaactcatgttctggtttttgatttgaggttttggtttgggtattgctcattttgagtgggaggttttttggttttcttctcttctgctgctgggtgtgtctgtttttgccattggctccatgtggctcccagggcaatgtggagaccaggccttgacatgggccactggtcctgaggtcctgaggtggtgttagagatatcttgcttttgaggctcccactccacccccaagctatgaaccagggccctggcttcagtgcctgcctcatgccaagggtgttttagtttcccgtactcgggaagagccaccatcattgctaccacctacaggaagcccagcacaggactgcagccccgctgtctgcttggctttctgtcccattgctgtggccctgagagtttgcattcgtttgtagcctggcctttgttaatctcatctattgtggtgatgtgtttctagtggggagacggcatcaagtgagagacttgccagcaccatcttgaccagcagccaagaatatgttcacatggagcttagcacagggcccagccctaggcaagtccccaccaccagcccatttgcctgtattctctccttaccatcctcattcctggctttaggcaggatacgtatgtgtccacacctagtgagattcactccctgagccctggagagcaaacagaggatgatctggaggaagagtgtgagccagaagagatgctgaagacaccatccaaagatagcttggatccaggttggaaaaggggccctattttgaactatgtcagtgtagggaatcattgctgggttttgcccatgaccttgtttacagggcctggcacatattaaaactcaggagtcgacagggtgcggtggctgatacctgtaatcccagcactttgggaggccgaggtgggtggatcacctgaggtcaggagttggagaccagcctgaccaatatggtgaaaccccgtctcaactaaaaatacaaaaattagccgggcgtggtggcgtgcaactatagtcctagctactagggaggctgagacaggaaaattgcttgaacctgggaggcagaggttgcagtgagctgagatcgcgccactgcactccagcctgggcaacagagcaagactccgtctcaaaaataataataataataataatataaataaaataaataaaattcagtaatcaggcttagcgtggtggctcacacctggaattttagcactttgggaggctgaaatgggagggtcacttgaggccaggaggtcgagaccagcctgggcaacatagcgagagcccatctatgcaaaaaaaaaattttttaaagaaattagccaggcatagtggcacacatctgtagtcccaactacatgggaggctgaggcaggaggatcacttgaggccaggagtttgagaccagcctggcacgtaccaagaccccgttcctacaaaaagaaaaaaattagccaggcctggtggtgcacacctatagtcccagctacctgaaaggctgaggcaggaagatcgcttgagcccaggaattccatgttataatgagctatgattgcaccactgcactccagcctgaataatagagtgagatcctgtctgtagaaaaagaaagaaactcaataatcatatcagtcaagactctttcagtataaaagcaaccaggcttaagtcaggaagaggattttttggtgcctgaaaattggagaggattagctttcagcatggctagatccagatagacagatgatgttaaaaggaagatttttttttgtatcttttggctctgcttttcttcatgttggctttgctgatggacagactgtccctttactaggggaaaagatacccccagcaactacaggcttataaaactccatagagaatagaacacctctttcctatagtagctcaagcagagtcttagggttgtgtggctcatgtttctggtatctgctgtacccacttctgagccagttgttgtagctgtccacatctcagcatgtgatcacttctgagggcagagactgtagtcagctccatccactcacaccacctgaccaggcatcaaagatgtgtttgaggccgggtgtggtagctcacgcctgtaatcccagcactcagggaggccgaggcgggtggatcacctgaggtcaggagttcgagaccagcctggccaacatggtgaaaccccatgtctgctaaaaatacaaaaattagctgggcgtgatggcgtgcgcctgtaatagcagctacttgggaagctgagacaggagaattgcttgaacctgggagacggaggttgcagtgagctgagactgcgccactgcactccagcctgggtgacaaagcaagactccgtctcaaaaaataaatgaacaagtaaaaataaattgaattatgttgcggatattgtccggaatctttttcctctgcaaagtctctcatctacctgtatgttggtgaatacaaagcagacgcctgcgaaattttaagttattcccctccaggtggccatttaggtttttcctgattgcacatcactgttaatgaggctatggagtggagaccactcctaagcctcctcgaaatgtgaggacttctccaggagagagtctgaggagtagcaccactggatcctggagttattttattttactttaaaaaagttgttttattattttatttcactatttttgttgcccaggctggagttcaatagcacaatcatagctcactgtagccttgacctcctgggctcaagcaattttccctccttagcctgtggagtagctgggaccacaggctcaagctcccacacccagctaaatatgtgtgtatcaggggatggtgtgtgtagagacaaggtctcactgtgttgcccaggctggtctcaaacccctggcctgaagtatcctcccacctcgacctctcaaagtggtgggattacaggcttgagccagtatgcctggcctttattttaaaagagaaccccggctgggcgcagtggctcacacctgtaatcccagcactttgggaggccgaggcgagcggatcacgagttcaggagatcgagaccatcctggctaacatggtgaaaccccgtctctactaaaaatacaaaaaaaaaaaattagccgggcatggtggcgggcacctgtagtcccagctacttgggaggctgaggcaggagaatggcatgaacccgggaggtggaggttgcagtgagccgagatcgcgccactgcactccagcctgggcaacagagcgagactccgtctcaaaaaaagaaaaaaaaagagaaccccaagagttctccaaacccagttactgccccaccctgcattgcattaggctctccattgtccccacacttttcctgccatcctttggtagtattaagctttttcacctcggtcagtctcgtgagtcaaatatcgcatcccacggtttaagtttgcatttccctaacccccggtgctgttgagccttctgacttctgggttgtggtgttgcctctttggggactgcccggttatgtatgtggcctgtttgttgggttgtttgtcctcttttcatggattctgtgtctttccagatcctcgttgcctgctaaccaacggcaagctgccactgtgggcaaagcggctggtaagtcttcagggagagggttgctcaggggctggcagaggaaacgcctccccagctctgccttctggaagccctttttcctttccatgtccctcttttccctggagaagccctgtcatccttccaggctcagtgagacagccctttgttcatgatcagtgctctctgccaggcattgttctggatgtcagggacacaacagtgagcaagggaaacaaaagtctctcccttcacaggctcacttgcctgtgtgggcgaggaacaatatccccattaaataagtaaatgacgtagtaggttgggtgctgataagtgctgtggagggaaaagaatcaagaaggaaaatacgtcagccaggtgcagtgatacgtgtctgtggtcccagctactcaggaggctgaagtgggaggatcacttgagcccaggaggttgaggctgtagggaactgagaaggcaccactactacactccagcgtgggcaacagagtgagatcctgtctcaaaaaagagaaaaagaacaggggcccagcacggtggttcatgcctgtgatcccagcactttgggaggccaaggcaggttgatcacttgagcccaggagttcaagaccagcctgagcaatatagtgagaccccatctctacaaaaaataaaaaaattagccaggcatggtggtgcatacctgtagtcccaggtactcaggaggctgaagtgggaggattgtttgggccagggaggtcgaggatgcagggagctgcactccacagcactccagcatgagcaacagagccaacactttgtctcataaaaaaaataaaaataaaaaagaaaataaggagtgttggggggtgtcagttttaagtaaacaggaaaggcctcattgggaaaatgatgtttgagcagagttgaagcaagtgagacaggcagatactgggacgaatgttctagtcataacagcctatacgtgtaaaagccacgaggccaggagctcgagaccagcttaggcaacataatgagactcccatctctacaaaagattaaaaatagccaggcatggtggtgcacacccatagtcccagctactcaggagcctgaggcaggaggatcacttcagcccaggagttggaggctgcagtgatcgtgctactgcactccagcttggatggcagaacgagaccttgtctcttaaaaaaaaaaaaagaaaaagagaccgggtgcggtggctcacgcctgtaatcccagcactttgggaggccaaggcgggtgtaatccaaggtcaagagatcaagatcatcccggtcaacatggtaaaaccccgtctctactaaaaatacaaaaattagctgggcatggtggtgcatgcctatagtcccaactactggtaaggctgaggcaggagaatcacttgaacccaggaggcagaggttacagtgaaccgaaatcatgccactgcactccagcctggcgacagagtgagactccctctcaaaaaaaaaaaaaaagaaagacaatgtggattataagagacagaataagagaggtgaatgaaggatgatcccaaggttggggcatgagtaactggaaaaaacaactgaaacagggaatctttaggaggagcaggtttgtgcagaggaaatgagttgagttgtcagcatgttaactttgaaatacctaccagacatccatacagaaatgtagagcagtcacatgtgcaattctgaagtttcagagaaaagttcatgaatcccagctgggcattcccagcactttgggaggccgaaacaggattccttgagcccaagggtttgagaccagcctgagcaacatagtgagagtccacctctaccaaaaaccaacaaaatgggctgggcgcagtggctcatgcctgtaatcccagtactttgggaagccgaggcgggcggatcacttgaggtcagcagtttgagaccagcctggccaacatggcaaaaccccatctctactaaaaatacaaaaattagccaggtgtggtggtgggcacctgtaatcccagctactctggaggctgagacaggagaattgcttgaaactgagaggtggaggttgcagtgagccaaggtcacgccactgcactccagcctgggagacagagcaagacttcgtctcaaaaaaaaaaaaaaaaaaaaaaacagagaaaggttcacgctggagatatgtacctggaagttgtttctgaatggtattgaaagccaagagtccagatgggctgtgtgaaatgtccgtgtcgctccctgcagtgagtgagcactcagccagttgcctgactgtccgatatccttcaagctaggggacgatgatgtggcagatggcttggccttccacgccaagcgcagctaccagccccacggccgctgggcagagcgggccggccaagagcccctcaagaccatcctggatgcccaggacctggattgctactttacccccatgaagcccgagagtctggagaactccattctggattcactggagccacagagcctggccagcctgctgagtgaggtacacacttccaccgcagcctggcccatagccccggcaccgtgacggccccagggcctggcgccttaggctgactcccactccatgggggcagggaggattacatgagatggtgaagggcaggagggtgagccccaggtctgttgcacagcaagacttcccaaggcagacagggagtctttggaaagtgggtcacttgggggttaagagcttggatgctagagcaggcttgtacccaagtgggggacatttgggtagatcgagccctgaccctacccattcctgttgtgtgacctggagtaagaggcttacctctttgggcttcagtcttctaaaaagtagtcataatggggtcaggggcagtggctaacacctgtaatcccagcatttggggaggccaaggcaggaggattacttaacgatcacttgaggagttcaaggccagcctaggcaacgtagcaagatcccacctctacaaaaatattttttaaatttttttgtttgttttgtttttaaatggtaataacaatctcttctgccccagagggcttttacaggaatccatgcttaagtatagggcctgggctcttagaggtgcccgtgcaactttagctctttctctactattttccaaacaaaattcatttttatcctatcctataatttgtcatcttcattgtggtataatatacatccagtaacatgcacagattttaggtatacagcttgatgaactatctgtgtaattcacgtgtgtccactaccctgggcaaaatctggagtgttttctacctcatagaaacccccttctgcccttcccagtcaggtccccgcaccaggataaccagtgttctgacctctcaccaaggactgggtttcctattcttgaacttgatataaatagacacgtagagggttgggcctcctatttttggtgccacacctcttcctcatctgtaaagggactgataatgcaggggcagaccaggacaagctggttgcgagtggagggcatggcacaggccctggttcacagcctccagcagtggggctgctggcatggttcctggcgcactgttggtggccccagccatgcctgcctcagaatggctgtgctgtcttccccatagtcagagagtccccaggaagctggccgcgggcacccctccttcctgccccagcagaaggaatcatctgaggccagtgagctcatcctctactctctggaggcagaagtgacagtcacagggacagacaggtgggtgtcctttccaccaagggagccttagttggaggaacccccagctgatagctgcatcctggaagaagtgctctctgccttcccagtgggcttgtgggagtggggacagttgaggcctggatggggcaggagcccagccttagttccctggttccaggtggggtacaggagggcctgacctgggggaaggagggggcatttggaggaggcggggaggctgtcgcagtgctcctgcaggagcagcgggtacaggtgcctaggggctccgggtggggctagctgttgagtctccagctgaagtccttgttccctctctgcccccactggcactgcagccagtattgcaggaaggaggtggaggccgggcctggagaccagcagggcgactcctacctcagggtgtcctccgacagcccaaaggaccagagcccgcctgagggtgagtgcagggcaggcagggaccctgtgacagtctgtgcgttcagccaagcccctttctgggcaccgatggtgactttgacccagtactgaagctcagagtctgtcgaggaagacacatgtggtccctgctgctgcctgaggattctgggcccagctgcctacagctgagagcccagctctgccacctccttgatgtggaacttcccttattcataaaatggggggcagctgctcttaccatccctcctccagatggggaaactgagcccagggaagggtagccctggccctggctcaccagaatggtcaggctgtgggctcctgaccccgactctgtccttcagactcgggggagtcagaggccgacctggagtgcagcttcgcagccatccactccccagctccgcctcctgaccctgcccctcggtttgccacgtcgctgccccatttcccaggtaagcaggggccagacacgcaggggactcgctgctcgggcctggcttagggccagtcacaatgtctaagcacaggccctgcacttggagcccactgagcctggaagacggggatccctgcttctcagcctgcgggcaacagggcagggatgggtggggcccgctttctccatttcaggtggcgtctgctgtgactcatggtgttggctcctcttgtccctcccctccttccctgtcaggatgcgcaggtcccacagaagatgagctgtccctgcccgagggacccagcgtccccagcagctccctaccccagactccggagcaggagaagttcctccgccaccactttgagacactgactgagtccccctgcagaggtagggccctgcctcacccacacctgccgaggccgtctgtgcagcctgggcacagcattggcgtccctggagttggctccccagcagggccaggagggtgagtggagagcaactgcttcgttttttttgagacggagtctcgctctgttgccaggctggagtgcggtggcccaatcttggctcactgcaacctccgactccctggttcaagcaattctcctgcctcagcctcctgagtagctgggattataggcatccacaaccacgccctgctaattttttgtatttttagtagagatgaggtttcaccatgttggccagactggtctcaaactcctgcctcagatgatctgcccgccttggcctcccaaagtgctgggattacaggcgtgagccaccgtgcccggcccactgcttcactcttgacctgagcctcacgatgcctcctcacccactgcccctgctcgtaccctgtgtctgtacataagggtttctggggagtgccccgctgggctgtgggctggcctagggccagggctgctcggcgggaagggttatgagggtcccctcgggatcttcccctagagctcttccccgcagctctgggagacgtggaggcctctgaagctgaagaccacttcttcaacccacgcctgagtatctccacgcagttcctctcaagcctccagaaggcatccaggtagaagctggccaagcactgcccaccctctggctcctcaacagtgccccagggcaggctgaatgagaatcatcccccctgctctcctccccacaggttcacccataccttccctccccgggcaacccagtgccttgtgaagtctccagaggtcaagctcatggaccgaggcggaagccagcccagagcaggtactggctacgcctccccagacaggacccacgtgagtattgggcccacctccgtcagggcacggggctgggaaccctgaggccttgtcctcacctcagagctgtgcctgcaggtcctcgctgcagggaaggctgaagagaccctggaggcctggcgcccaccacgtgagtgccccagtcccagacggacagtcctgggtttctcggcgagtggccggatgtccagcctagctgtggggcgtgggggccctagccatcagttctgtgtggtggagtcagtgccatctgcttccgttacagctccctgccttacgagcctggcgtcctgtgtccctgcttcctccgtgctgcccacagacaggaatctcccaacgcccacatctgcacccaccccaggcctggctcagggtgtccatgccccctccacctgttcctacatggaggccactgccagctcccgtgccaggatatcacgcagcatctccctcggtgacagtgagggccctatcgtggccacactggcccagcccctccgtaggccatcgtccgttggggagctggcctccttgggccaggagcttcaggccatcaccaccgcgacaacacccagtttggacagtgagggccaagagcctgccctgcgttcctggggcaaccacgaggcccgggccaacctgagactgaccctgtcaagtgcctgtgatgggctcctgcagccccccgtggatacccagcctggcgtcaccgtccctgcagtgagcttcccagcccctagccctgtggaagagagcgccctgaggctccacggctctgcctttcgcccaagtctcccagctcctgagtcccctggccttcctgcccaccccagtaacccccagcttccagaggcccggcctggcatccctggcggcactgcctccctcctggagcccacctccggtgagtacagccctggagcaaggactgtcccctaagctcatcctgtgtgctagttggctcagctccaaagatggatacttgacctggccacagggactgtgccattcattcattcgtgcattaacttaaatatttaatgagcattacatgttgggctttgtgctaaaccctgggacatgggacatggtggtaaacaacacagagaactgacagcttcaatggggacaatgcccagactaaacctttaaggaacccgtcatatgtatcacgaagtgacacatgcttaggagggacagaggagggcgagggagtgcagggtggggacaggggttgggattacaaaccagaagataagaagaggcttcagggaggaggctgcattggagcagagacctgtaggagtgaaggggagggagccttggggacccagagaagtgttccagacagaagtacagcatggagtccacccagtcgctctggccgctcacaccaatggaatgcagctcatcttgctcattcccttctctctaccccaggtgcacttggtctgttacagggcagccctgcccgctggagtgagccctgggtgccggttgaagccctgcccccatctccccttgagctgagcagggtggggaacatcttgcacaggctgcagaccaccttccaagaagccctcgacctttaccgtgtggtgagctaagccccagagttgggaaagggttgaggggtctcttgagaccgcccggccttggtggcccctgacaaggctggcatcccttgcagttggtctccagtggccaggtggacaccgggcagcagcaggcacggactgagctggtctccaccttcctgtggatccacagccagctggaggctgaatgcctggtggggactagtgtggccccagcccaggctctgcccagcccaggacccccgtccccaccgacgctgtaccccctggccagcccagacctgcaggccctgctggaacactactcggagctgctggtgcaggccgtgcggaggaaggcacgggggcactgagggcgcagcccctccaccgcagccctgctgcttctgaggacttaggtattttaagcgaataaactgacagctttgaggaatggttcctggtgtctgtttgggcctatccacaaagccctcttcaagtggaagtggggagggagggtagaaggtgatgcccagaggactcgtgtctgtcagtggagagcatgggaccagcgctcccaagaagttcaggaactgcagccatgacctcagggccagtcctcccacactgcccacagagctgccacagaccagtgtgaggtgcttacccagtggggcccatttgtgccccagggaggagccagaccctcttacctgccccctgccagtgcctgagaactcactggggctgctgtgatcaccatgtgcctaccttgcccagcagtccacgctttgccatatcatggctcagggcctctgggccaaggccacactagatcccacaaagtccacggtggtggtgtccccatctgcaacaggggaaactgaggacccatgaacaggcttgcccaagctgggtatggtggcctgcacctataatcccggctactcaggaggctgaggtgggaggatcgcttgaggccaggagtttgagaccagcctgggcaacttggtgaaaccccatctctttatttcatgtatttatttatttatttttgtttttgagatggaatcttgctgtgtcatccaggctagagtgcagtggtgcgatcttggctcactgcaacctccgcctcccgggttcaagcgattctcctgcctcagcctcccgagtagctgggattacaggcacccaccaccatactcagctgatttttgtatttttagtagagacggggttttgccatgttggccaggctggtctcaaactcctgaccttgggagatccgcccacctcggcctcccaaagtgctgggattacaggcatgagccaccgcacctggccaaaaccccgtctctttaaataaaacaaaataaaacaagaaacccaggcaggcttgcccactgtatgatcctggcagcaggcccaggccacgagcagctgggaccaataactgcttccccttcagaagttctacattccacgagctcccagcactgctaccagctcccccagacagcaggcatctggccacatggggtgtctgctaaaaaagccactcttggctggggtgtggtggtgcacacctgtagtcccagctactcaggaggttgaggcaggagaatcgctcaaacccaggaggcagaggtttcagtgagctgagatcacaccatcattgtacttcagcctgggtgacacagcaagtctcaaaaaaaaaaaaaaaaaaaatcctgccagttcccacccaggtgccgggcactgtagcagaaggaacatcaggcaacgcacctgccctcatggccactcaccttctatacagtcaaacagatgcaggaattagagctctgtataattctagataggttggggagatccattgctggtgaagggtcagggaaggcctttcgaggtgacatttgggctgaagcttgatagaggacatctcaggaacacatccaggccgacagcacagccagtgcacaggcctggggcagccacacgtgatctgtgtggaagcaagaggagcgaagcccggacggctggaatggagtgagcaaggggagggcaggagctgaggtgcaaggaggagcagggccttgttgcttcataacatttaagtccaaggaatatccagaacagttttttgtttttgggtttgtttctaaatctctgctcttaatgtttgggggatatccagtgttgcttatttctcacgactctgcctcagggagtccaggtggtccagaacttgaaccacctgcctaggcctaggcccatctgcctagttcggccaccattgcccaaaaccttgcccaacatccctgggcaaagcttggtgttcagccccccaggcctcggacacccaggagaccaccttgggcctctgtcatgcatggaattacccttccttccaacctgtatcatagtaaagtcttctgctccaaggagtaaacacctggctttcagggcccaagatggagggacgttggttacccttgatgtcatcatgcacctggcctcttcctctcctgctctgttatcctctgtgagcaagcttcagtctccagcttatggcctcatggttgcaacacggctgctgtggcacccagcagcacaccctcaggtggtgtctccattttgcaattgttggctttcctgcagccctgactgaagtgcctggcataagcctggaagcgcaggagctagaagctgccccgatagtactgctatggggaggctgaggttagatgtggagtgcagggggctcacagagggtgacagcaggagaggaagaggccaggtgcacaatgacatgagggtcagaggcccaagttattggtcccagctgctgggtggcctggtccaaccaggagcaaaggcacagagcagggcaccctctagggcagcagaaaagatgcagatctctcccaggggtctccctgggagactcatctggggtcagatgagtcccaggcaacaggaatggagattgctttgatgtgcttggaccatctctcctgtcctgggcatgttgcagctcaaacaaagaggttctctcaataagaaaggcaagtgggctggtaatcagagaggatccagcatgtctgccacttccctcttccaaatgccaggctctgtcctggaaggaccatactttctccatacttcttaaccaggataaaccacctggttaagaagccactgctggtggtgcagcatgtgtgcatgtggtttgtgagctgacagggtcccagcagaaagatgacagcatgcttagatgggatattccaaagagtttaaccaagggatcatttgcaaaggagcagcagggactgggaaaccaccgaggctggtgcagaaccccaggactggcaccctgggagctgttaccacccccaggccacaaggcacaaagagaaggaacaagaacccaaaagagcaaatcccagggagagggtagtgctgagggagctgcagccctgactcccacacaggacggagtgagaatcaacaccctgaccttactcccctcctgcagggcaccccattgtccaaatcctactggaagccagagtgcatagaagcccaggtgaccccgcctccagtcaacctcctaggccatggagcagggcagaacaggactgagagggttcctggggaactgggtccctggaaggaaaacagttcatctttcactgcaactccccccctgcttctacccccacatctacccttggcctccccatagcagtaccatcaggacagctcctgggtcctgagctgccaggcccgtgccaggcatcccagtcagggctgcaggaaagccaacaattgcaaaatggagacaccacctgaaaccccattttgcagatgacccacctgaggcctggatgtttgcccagaggagggattcctcggcaggatgcagtggctcattcctgtaatcccaacactttgggaggccaaggcaggcagacggtttgagctcaggagttcaaaaccagccctaggcaacatagcaagactccacctctacaaaaaattttaaaattagctaggtgtggtggtgcacgcctgtagtcccagctacttgggaggttgatgtgggaggatcacttgagcccaggagcttgaggctacagtgagctgtgttcactccactgcactccagcctaggtgacaaagcaaggccctgtctcaaaaaaaaaaaaaaaaaaaaaccttcctaaccaatccctgcttatatgtctgccacatgccaggccccatgctaagcattctctccatgtgagctacatggatcttcaatacaaactgggaagagggagattccttagtctcattttccaggtgaagaaaccgaggcccaatgagaaatgacttgctctgggtcctgcagagagcaagcggaaatgcatggccagcagaccctcagcactgccacccttgcttccccaaatgaattggcacaactgactctcgggcaatgtaaagaaatgaagaaatactcctctcaccagcaagccttgtacagatgtccccctctgactagaacaccctcccctttcatctgaaacctttcagcgcttatccaggaagccatccctgtacccgtagcctggatcaggagcctgttcgggtccccaggtacccctcttttccccatcatggctgggtctctgcctcacttgcctctcactgtcttggtcattctgggctgtcactggtgtgcctccttcatggacttacgcgatcattttcagtaagctaggtctggagcttagaaaattgtttagttgccaggcgcaatggctcacgcctgtaatcccagcactttgggaggttgaggcaggtggatcactcgaggtcaggagtttgagaccagcctgcccaacatggtgaaaccctatctctactaaaaatacaaaaattagccgggtgtggtggtgcgcacctgtagtcccagctacttgggggactgaggcagcagaatcgcttgaacccaggagacggaggctgcagtgtgtggagatcgtaccactgcactccagcctgggcaacagagtgagaatctgtctcaaaaaacaaaacaaaacaaaacaaaaaaaataaaaacaggttgggcgcggtggctcacgcctgtaatcccagcactttgggaggctgagccgggcggatcacctgcatttaggagtttgagaccagcctggccaacatggtgaaaccccatctctacaaaaaacacaaaaaatcagctgggtgcagtggtgtgcccctgtaatcccagctacttggaaggctgaggcaggagactcacttgaacccaggaggcggaggtcatagaggagccaagatcacgccattgcactccagcctgggcaacgagcaaaactccgcctcaaaaaaaaaaaattaaaaaacagagcttggattgcttcttagtcttctggctaagaatcaagtgtaaaacagcttggccagtgtgccggggtagggtcctgggagcccctggctgtgtcaagagaccccctttgggccaggtgcggtggctcatgcctgtaatcccagcactttgggaggccaaggcaggcggatcacttgacgtcaggagttcaagactagcctggccaacatggtgaaactctgtctctaccaaaaatacaaaaattagcccggtgtggtggtgcatgcctgtagtcccagctactcaggaggctgaggcaggagaatcgtttgaacccgggaggtggaggttccagtgagccaagatggtgccactgcactccagcctgggcaacaagagtgaaactccgtctcaaaaaaagaaaaaaaaataggagacccccttttactttccagactgtgggagggaggaagagtgttgtcccaggcagtaactaggggctagattattaacaaactagtattttagtgcctgctacacctgaacagtgcttctggctgaatgttagccctgggaatctgaagatcagagaggtggggcatcctacctgaggatgcacagcctggatcctcattttgccctgatttatccagatctgctgtcctccctgcaccctacagagcagggcaatcacagcagggggccccttcagtgtcctcagacagctgctgtgatttgaataaccaggcaggctgctggatgtcccctggtgactgatttgcctggcaaacagaccctcaacccctgggagacagtccccctggggccttgtttcttcttcctatcctcaaaagctccccaggcccatctccccttgcctggctctgcttggtggtcctagtgcttgtccacccctggaggctggatggttccctccaaaacctgggagaagatgggcaggtccccaggcaggggtaacctgagccagcttagtccactcccagggccagccaggaaatttgcatgaagagaatgaggttcctcagaggcttcccctcctttcccaccagggatagtcatcctggggctgaggtctgacagcaggtggaagcagcccctgtgtgtggagagccttccggagggcatgccccgcgccttcctggtcaggagtcggcgtccacagccccccaactggggccatctgcctgaccagctccggggagatgcctatatcccaggtgggcccctcactgtgcctggaggtaaggggcaggagagacgcagtgtcaccatctggcttttctcctcagactgcagcagcctgggggggccaccggcacaacagtcgtccagtgtcagggatccgtggacagcggtgagtgtgtaactggctagcaaagccagctgtttcgctcctgcctgctctcagccttaatgaagctgacagccccttgctcccccgacccatctgcacacgccctccagcctcgggacctgtccgcccctacttctctgtgttgggaatgcctctcctttcctagtagtgagctctctactgttaggtctcaccccaggcaccagggccggcagccacagggatctcttccagcggggcacaagattcatccccacatgtggatgatccgctttatgtcagaacatgggacaaggcaacaggagtgcgatgggagataagggctttttcagctgtgcatgcattggaggaaggaaagcgccagccggaatgtaatatattcatgaaagcaaggcactgttctaggcatgggctgttatattcagcgggaataagacaaaaatccacaattttatggagcttatattctggttggggctgcatgtatagacaataaaattagtcagcctgtaattccagcactttgggaggccgaggcgggtgaatcacttgaggtcatgagttcgagaccaggctggccaacatgttgaaaccttgtctctactaaaattacaaacattagccagacatggtggcacgtgcctgtaatcccagctcctcaggaggctgaggcaggagaatcagttgaacctaggaggcagggcagaggatgcagtgagccgagtctgcgccactgcactccagcctgggaaacagatctagactccatcccccctcaaaaaaaacaataaaattagaaaaatagaccgggcatagtggctcatgcctgtaatcccagcactttgtgaggccaaggtgggtggattgcttgaggtcaggaatt

SEQ ID NO: 78 - DNA, 8134 bp, Homo sapiens
  misc_feature (1)..(8134): n = a,c,t, or g
gggattccgggccgggccggcctgggcgcaatcaatgcggctttgtctgggacgcccacatcccagaggccattcccgggtcggcaaatcggagcgcggcggggcgcgcgggggtgagataagcggccatgtgatcccacctgggctggaaggggaggggcgccaggtgaggcggcggccggtggggcgcgggcggccacgcggggctcctgcagcatggctgtcagcaggaaggactggtccgcgctgtccaggtgagcgccggagggagccgggagagatggaggttgccatgttgctcaagctggtctcaaactcctgagctcaggcaatccgcgtgtctcagcctcctaaagtgctaggatcataggcatgagcgaccgcgcctggccgatgtacatagttcttaatgagacctttcactggtcttcaagatcccagtgtgtatttcacacagcatgccttggttcacaccagccacgtttcaagcacttctgagctgctagtagccagtgcaggcctagagggcatttggtctcttctcccagccctagaggagcctgcctcgggagggtcctgggtttccccagctgtgctgaccctctcctcccctcccccagccttgcccggcagaggactctggaggatgaggaggaacaggagcgcgagcgcaggcggcggcaccgcaacctgagctccaccacggacgatgaggctcccaggctcagccagaatggagaccggcaggcctctgcttctgagaggtaggtgctcaggtttctatcctgatggatggggatggactggttgcctcagactaagtgcagcatattcagtctgctcaggggagttggggcccaggaaatgaggctgaagggtgtgatgatgaatttccagttccccaccttccccagactcagtcctgccagcttccatcctcttcataacaatgcttgctactatttgtagaccatccatgagccaatactgtgctggacattttatggccatagctcacgtaatccacacaatgtccctggagagagaggtattgttaacccattttacaggtggagtaacagggttgaaaagtacttaggtgacttgctgagtcacgtacctcaagatggcagggccagaatgtccatccagatctgtcaagctcccgcctccttccattatccaggctgccttcttctaaccctgaacctctataatttacttcgttttttttttttttttttgagacgaagtctcgctgtgtcgctaggctggagtgcagtggcgcgatctcagctcactgcaagctccgcctcctaggttcaagcaattcttctgcctcagcctcctgagtagctgggactacaggcacccaccaccacagccagctaatttttgtatttttagtagaaatggggttttaccatgttggccaggatggtctcgatctgttgacctcatgatccacctgccttggcctcccaaagtgctgggaatacaggcatgagccaccgtgcccagctgccttttttttttttgagatggagtcttgctctgtcaccccagctggagtgcagtggcgcaatcttggctcatgcaacctccgcctcccaggttcaagtattttgcctcagcctcccgagtagctgagattaaaggcacctgccaccatgcccggataatttttgtatttttaggagagatggggtttcaccatgttgggcaggctgatcttgaactcctgacctcaggtgatccaccagcctcaacttcccagtgctgggattacaggtgtgagccgctgcaccggcctataatttacttctgaggagaagaaccttggggctagttttgccatctagattttgggattatgaggtgggggaagagcctggggtttactgaatgccacctacatgccaggactgtcctgggcaccctcatgagtctcattttgcttcctaacaagcccagtttgtagatgtgaaaactgaggctccgacagtaagttaacttgcctgaaagcacatggagagcagggtgatgaggaaggaaaataatctccttttgctggagccaggtgctgtgggttatggacaatcctctcatgttacttttgtttctttgggtcccccagaagggagaacaggctgtgatgaccctctcctctcctgtcctcccctcccccagccttgcccggcagcagactctggaggatgtccagagctgggctgcaccagtacctgtggctgtcacctagtcttggctgcacccacaagactgacaggagtgtggaatggtgcatcggaagacttaggttctgctcccagctcccccacgaatcagctgtgtgaccttgacaaaatccctggacatctctagtcttgatctaagatctaaggggcagagactgtgcttattccttttgatgccccaatgccccaagcaggctctggcacatattaaaacagttattcagagtctgttgactacgtctgaacatggagtcgttggacttcataggaatttataagctttttaaaaagcatagtgtgctttgctcagatgataccttggaagtgcaatatatcgagtggataaaggtggtggtgagccggggatccagggcctgacatcctcacctcctccttggtggccctggcagcatctccattgggttaggtatacttagggtatcttccacctctatcctctgattctgtctcccatcttctgattcagactaccgagcgtggaagaagcagaggtgcccaagccactgcccccagcctccaaagatgaggacgaggacatccagagcatcctcagaacacggcaggagcggaggcagaggcggcaggtggtggaggctgcacaggcccccatccaggagaggctggaggcagaggaggggaggaacagcttgagccctgtgcaggccacacagaaacccctagtctccaagaaggaactggaaatcccacctcgccggagactgagtcgggaacagcggggcccctggcccctggaggaggagagcttggtgggcagggagccagaagagaggaagaaaggggttccagaaaagtccccagtcttggagaagtcctccatgccaaagaagacggcacctgaaaagagcctggtctccgataaaacctccatctctgagaaggtgctggcctcagagaagacatctctatcagagaagatagcagtgtcagagaaaagaaacagctcagagaagaagtctgttctagaaaaaaccagtgtctctgagaagtcgctggccccagggatggcactgggctcaggaaggaggctggtgtctgagaaagcttccatctttgagaaggcactggcctcagagaagagcccaactgcagatgctaagccggccccaaagagggccacagcctcagagcagcccctggcgcaggagccgccagcctctgggggaagcccagccaccaccaaggagcagagaggaagggccctccctgggaagaacctgccctctttggcaaagcagggggcttcagaccctccgactgtggcctcccgcctcccacccgtcacactccaggttggcagtgtcccgtccctcccacccttctactctgccacctggctggaactgccggccagtcccacccaggtagtccctggttccctgggtgcctccatcctcctacctgcaggctggccttggaagtctcttctttccctgcctgcttctagccatggtcagagcagggaggctgagatggggcaggctgctggagcttaaagggggcccagctgtggggcagggagcatctggtgccccccaccatatcctcatccagggcctgggctccaggaccccggcagactagtggggagcctcagatccttctagaagctcccctggaaagctctgcctggtgccctggccccaagggactttgtctgtgagccactcccacagcagatgaaggaggcaggagagaaggcacagggctgtctcattctcccctcttcctgcagctcctggggtgagccatggggtttatggctgccccggcttgatgggccctagacctcttatgtgacactccccctgctccatccaggtgaaaatccccagcaaggaggaagaggcagatatgtcctcacccacacagcgaacctacagcagctccctcaaacgctccagccccaggaccatctcctttcgggtgagagccctgggcaccctggtctgcgagccactggagggcaagtggaggaagcccgcatccattacaacataggagccgtaggttaggtaggaaggtcccctggatagagaggagcttttgattcccatgggtggccctgaacaaacaaggttgtattcagcagaggagaacaggttagtaacctggggggtaggtgccagtaagcatgagcagccccacctagtgggcaaggcagggtgtatgaagaccggacaggcagggctggccctggtttgcagggaggtccacacctgcttcatcagttcctggctcacctaggagattgtctaggaggggaggggaggaacagagagcagcaaggctctcctactgctccctgccctgccactctcccaatagtacaaactatgtggattggggaaatctcgtcttgctttgtcctggtgtttattcttggttcttctgttcactgggtcattcactcaatcattgggtatcatgcctctaatgtgtgccaggccctggagaggtggcccaatagcgactggtgcccccacagagctcatgggtagtgggaggcagataggaaacaggtggttacaggtgccctgcgaaggaagtctgaagaaagtcttctgacccatattagtgggtgggaacctgtgtcttccagatacaaacaaggatctttaacgaaggcttgtccacatatttctttggtggggttgacccctggtagaaggggtgggaggtctgaagaggaggaggacatgtcttgagagctgggctcctcactcgagggggccaccgatttcccggggactcccacacaacaatgcctttccttctcatttcagatgaaacccaagaaagaaaactcggaaacaaccctaactcgcaggtggggggcctggaggctctggttctttctatttggccatgtccaggctattttctgagtacctgcacccgccctcctgtgccaggctgtggggtagggcacatgaggggaaggtgcagtccttgcccagggctccagatctggcagggggatgggattaacaggatgaactcaggcgggataagatggaacaaggatggggaaggatcagggagagctgctcagaggaggcagggcttgggtggggctccaaagggggatgagggtttagccttgaggttaggacagggcaaagggggctttctgggagggagaccacgaacagtgtnagggaggggaagcccctgctccagcaggcctggttggggggctatgccagactgtgggggagggaaggggaggcccagatcactagagccttgtatgctgtgccaaggcctatggggtctgagctggaaggacaggatcagatttgaggtaggagcagccatgtggagagctcacggtggcaggctgggagagcaggtaagtggcgattgctgtgatggggaagacggaaaggaaggacctgctttgggaggtgttttgcagtggaaatgacaaggtatgggggagaagggatgtcctattgaatgggacgttncttggaagnggagggaaatccctggcgtctgtaagttcctcatgttggccaagtcaacacagcctgcngtgtgatggagggccacattctcttggccacaangagaacgtgtgatggggctgctcctcaggccctgggggcaggcctggtctgccctgggtgtctcacttggctcgcctgttccatcttccatcctgcagtgccagcatgaagctcccagacaacacagtgaagttgggagagaagctggagagataccacacggccatacgggtgggtgggggcttctcctgaggggcggagggtgcaggatgagtagtgggcatggccctttcccctccccagcatgggtcagctgttggtgttcttggttcccagagatcagaatctgtcaagtctcggggtctgccttgcactgagttattcgtggctcctgtgggtgtagccagcaagcgccacctctttgagaaggaactggcgggccagagccgagcagaaccagcctccagccggaaggtgaggggctcaggccccacagggtccttagggtgattagccctgacgtctccaaaacccaaatcttggctgtggcaatgctagaaaactgtcctcatgtgtcaattaatgttggcagaactccatttgagttcccattcacgttcctgagcccatctccttagctgggcacacagctccctgggggaaggggagggggctgtcccaggtatatgtggcatgtgctggatgcataggggagtgagggagagtcctatcccattccagggcctctgaacatgcctcgctgctgcaagggcctaaaccctgagatggaaagttctctttttaggagaacttgaggctctcaggggttgtgacatcaaggctcaacctgtggatcagcaggacccaggaatctggagatcaggacccccaggtatcctcaccctccctgatgtctcttactgtggagcctttgtggtgggatgactggggacagaggagggacagtcggtagaggaggagtcatttcgggagaggaggagtcatttcgggagaggaggagtcatttcaggagtggaggcagtcgggaatagatgggtgtgtgggtcagactctggcagagaggaggggtggtctggttccttttctctttcgggaagagaaaggacatcctgggctgggagctgggcctggggtatcccgagccctttggagcctggtcttagactctggcctccaccctgataccctcaatcaggaggcacagaaagcatcatctgcaaccgagaggactcagtggggacagaaatctgactcctcgctggacgctgaggtgaatggtggggaggagcctggccctacgggggaggccccggtgtactgtgggagaccccatcgtcgccgtgtgcacacactaattggcctgcaatcgcgcagtccacccagaacgcccccatgccctgctcatgcagattggtctgagccaaccgtgagaacaaggttgagccctcacctggttgtgctgcctgcagctctgcagagcccctccctcttcagctggcagattacagggctctgactccttgtgggtgtggggcttgggcaaagggatgccttcctatccagtggcccccttccccttccatgccctgacaccccattgacttgtgctaacagctcttttccccacaggtgtgacaagccccgccaagacagacctgcaagtcttcgtctcaagggacctccctcatgccaggcccctgcctctcacagcagcaccctttcctctcattgtccctgttcccttgttggctgtggatctgtttggccagggtccctggggtcaggaatatttgcaagactcagccagctccttcccagcccagcctcttggggctgggactttctcaccctgcggcaggcacaacagatgctgggacccagtctctgcccaggtcacagcacaagtgcacatcagcactatggggcctatgtcctgcccagagacctctgctccttcctgctcacatccacagtcagggcacggcgcccctcaagaactccagagtcacctgtctcatcggctcccaacaagtgcctctttgtctatgatgtcccccttctctgaggcctggacccacccatctttgtccctgggggctgctcccagccactgaggcccgctctggccaggggagaaggagctgccgtgcgtcttccctgtgccccgtctccctgcttggttctcccctcccttccctggccggctgccatggccaggagctaagtgcctttttgtgtgcaaccacttaccctttctctgaaaaacctgttctcaggaaggatctgataaactcatttactctc

SEQ ID NO: 79 - DNA, 6165 bp, Homo sapiens
  misc_feature (1)..(6165): n = a,c,t, or g
tctagaagattgactcatgcaaaatgcacatcaagttattgtgaggtcctgaaatgatatctggggcttgggcagaggatcgttatagagtttgccctaccactcaaatgctttgggaggtatgcttcctttacacctctcaaatgtgcttctggtcttctggcttaggaagtcaaaatttaaacctagtcctctatggaaaaatgggctcctgtaacatcctgcagaattattaaaataaaacaaggacctagatggataactttcatttgcactcactcagctccaaatcagcatgatccccaaagtctcttgcagctcagaaattccatgaagctagcttacttttcctaacaagaaaatccccttctagaaatgcccatccgctatttgtaaactttcttagtaaactgataaatagatcatttgcccttaaaacaaacttttaatttcaactctgaaagacatgcatatatgtccttcagaatcttaccttttaaaatggaaactgcttggaagtggcttttacctggggaatatgacatgcatgtgtctgttatactgccttcctgccaaaataagtgtgtctttaggcacgctctttgcatattctattgctaactacattttgccagacactgcttgtgaatgcagtatgtgtgagaccactgcccagcttcctgtagtgctagtcctacatttccacacagaactcctcacctagccaaattcttgagcgctttgcagtcagcagcactacctgaggctctgcctgagtgtcactttagttgtcttgcagaaagcttcagatgtccttggttctatttaggttgtgcaaatagacatatgaggtttggttctggttagtggttgctagtaccagatcaccttgcttactggtgagttcattcaaacccaaaaagtcacacctgtgtcctgtgcgcgggtgctgcaggcttaggtggagaaaagcagggctagaattggaacccaaagcccagaatggcaggagaggatgtgggggctccacccgatcacctctgggttcaccaagagggtatctaccgcgacgaataccagcgcacgtgggtggccgtcgtggaagaggtaactgtttacattttgcttatttctttgattttgctttcaagtaacttggtttctattccagtctcaatattctgaagtctttggttttatttttgatcattcctttccattaggagacgagtttcctaagggcacgagtccagcaaattcaggttcccttaggtgacgcagctaggccaagtcaccttcttacctcccagctacctctcatgtggcaactctacccggaggagcgctacatggataacaactctcgcttgtggcagatacagcatcatttaatggtacacatgttgcttaattattttccattgtactgggactctcgtaacagagtactccataaacttttctttttctgacaggtcaggggagtacaggagctgttgcttaagcttttgcctgatgactaacctggtatgtatttctatttctcctctgtcctccccctctttgttttggctctattcagttgtggtgattttaatgatttttttttccaggtgctgggattctacgaagatatgctcctttgttctgttcagtatttggcaatcacttcatccactactgcagtgcacccacccttgggcctggggggagggagtgggttgaaaaactgctcaagaaacagaagtttagcaagggtcatgaagaatactgcaagtgaaactgcagagagaggttacgtaggcagaaagcaagtcaacaaaagcacttagtcaggatccgtaacttgaaattgactcctttggaaattgccatagaacccttaatggacatcatcggctggacctgggatctgatgaatcccacaaaagtcagcaccttctacagaacagatgccctgatcaccaaggacttggtactgatttagagagaagagagcagctcctagcagcatcaacatctatttgtcgcttatttgccctgcagcaattcacctgcctttccttctcccatcctgtaaatatcctaggttttgctccagtgtttcccatcccagtactgacctaatttggatctgctgagtatttagagggctctgaaaagagatatgcattgatgaaattagctacaaaggcttgtgggcctttttttctatctgaaatcgtgtcttcaaattactggaagttgctgatcaaaattgtgggctcttgaattcaatcaactcttttgaatactgtaaaccaacgttaggctagaggagccgacgggcagtggctctatcattcgcagaagaaacccttgataaatgattaaactccttgagctttttttattacgcatatataaatgggaatcatacctacctcaaagcattnnnnnnnnnnaaaaccttacttttaatgtatataaactgttataactactttaactcaggaaattctttacaagatgtaaatgttttcctaggaatcagcaatatttggtgttattacttcctgagaaaggtgccagttaagcagctaaaatggtttttcttgaagttctatagaaaccacgttatttaaaatatctgtaatcagagaatgaattcaaggttttttttccatgtaaagctatttatatcttccaagcctaatgaaatggatattataaaaatacagttgattcatcctatgtttgggaagagtatttttagtgtaattattttccagcaattgtaagggcatatagtgcttgtctcagaagaaaattccacgtagaggggctttaaagtctttatggaaaaaagaaaaataaaaatcatttttcttgttttagttttctggatatgccgcagaaggatccgtgccagaagcaagcctgtgagatacagaaatgtttacaaggtagtatattgtaaaatgctttaaaaatatttttccactgtgaactaactataagagaccaattattcttttatctgtattaactcttttttaagaatgtaacgtatatgtaattatcctgaagattctcttcattgtatcaaagatgcagaaaataaaaagtaatgtgatcaaagctaaaaatttcactccaggtgattagcatcacctggagatctttaaacacttacctagaacaattcagacttcctagggctagggctagaaaaaaagggttttttgttgttgttgtttgtttttactaaaaggctagttttaaattggttatacttcactgcagctgacataacactttttaaaagcaatctggaagaggtgcggttgaaataacaattggaattnnnnnnnnnnnnnnnnnnnnnnnnnnnnnnnnnnnnnnnnnnnnnnnnnnnnnnnnnnnnnnnnnnnnnnnnnnnnnnnnnnnnnnnnnnnnnnnnnnnnnnnnnnnnnnnnnnnnnnnnnnnnnnnnnnnnnnnnnnnnnnnnnnnnnnnnnnnnnnnnnnnnnnnnnnnnnnnnnnnnnnnnnnnnnnnnnnnnnnnnnnnnnnnnnnnnnnnnnnnnnnnnnnnnnnnnnnnnnnnnnnnnnnnnnnnnnnnnnnnnnnnnnnnnnnnnnnnnnnnnnnnnnnnnnnnnnnnnnnnnnnnnnnnnnnnnnnnnnnnnnnnnnnnnnnnnnnnnnnnnnnnnnnnnnnnnnnnnnnnnnnnnnnnnnnnnnnnnnnnnnnnnnnnnnnnnnnnnnnnnnnnnnnnnnnnnnnnnnnnnnnnnnnnnnnnnnnnnnnnnnnnnnnnnnnnnnnnnnnnnnnnnnnnnnnnnnnnnnnnnnnnnnnnnnnnnnnnnnnnnnnnnnnnnnnnnnnnnnnnnnnnnnnnnnnnnnnnnnnnnnnnnnnnnnnnnnnnnnnnnnnnnnnnnnnnnnnnnnnnnnnnnnnnnnnnnnnnnnnnnnnnnnnnnnnnnnnnnnnnnnnnnnnnnnnnnnnnnnnnnnnnnnnnnnnnnnnnnnnnnnnnnnnnnnnnnnnnnnnnnnnnnnnnnnnnnnnnnnnnnnnnnnnnnnnnnnnnnnnnnnnnnnnnnnnnnnnnnnnnnnnnnnnnnnnnnnnnnnnnnnnnnnnnnnnnnnnnnnnnnnnnnnnnnnnnnnnnnnnnnnnnnnnnnnnnnnnnnnnnnnnnnnnnnnnnnnnnnnnnnnnnnnnnnnnnnnnnnnnnnnnnnnnnnnnnnnnnnnnnnnnnnnnnnnnnnnnnnnnnnnnnnnnnnnnnnnnnnnnnnnnnnnnnnnnnnnnnnnnnnnnnnnnnnnnnnnnnnnnnnnnnnnnnnnnnnnnnnnnnnnnnnnnnnnnnnnnnnnnnnnnnnnnnnnnnnnnnnnnnnnnnnnnnnnnnnnnnnnnnnnnnnnnnnnnnnnnnnnnnnnnnnnnnnnnnnnnnnnnnnnnnnnnnnnnnnnnnnnnnnnnnnnnnnnnnnnnnnnnnnnnnnnnnnnnnnnnnnnnnnnnnnnnnnnnnnnnnnnnnnnnnnnnnnnnnnnnnnnnnnnnnnnnnnnnnnnnnnnnnnnnnnnnnnnnnnnnnnnnnnnnnnnnnnnnnnnnnnnnnnnnnnnnnnnnnnnnnnnnnnnnnnnnnnnnnnnnnnnnnnnnnnnnnnnnnnnnnnnnnnnnnnnnnnnnnnnnnnnnnnnnnnnnnnnnnnnnnnnnnnnnnnnnnnnnnnnnnnnnnnnnnnnnnnnnnnnnnnnnnnnnnnnnnnnnnnnnnnnnnnnnnnnnnnnnnnnnnnnnnnnnnnnnnnnnnnnnnnnnnnnnnnnnnnnnnnnnnnnnnnnnnnnnnnnnnnnnnnnnnnnnnnnnnnnnnnnnnnnnnnnnnnnnnnnnnnnnnnnnnnnnnnnnnnnnnnnnnnnnnnnnnnnnnnnnnnnnnnnnnnnnnnnnnnnnnnnnnnnnnnnnnnnnnnnnnnnnnnnnnnnnnnnnnnnnnnnnnnnnnnnnnnnnnnnnnnnnnnnnnnnnnnnnnnnnnnnnnnnnnnnnnnnnnnnnnnnnnnnnnnnnnnnnnnnnnnnnnnnnnnnnnnnnnnnnnnnnnnnnnnnnnnnnnnnnnnnnnnnnnnnnnnnnnnnnnnnnnnnnnnnnnnnnnnnnnnnnnnnnnnnnnnnnnnnnnnnnnnnnnnnnnnnnnnnnnnnnnnnnnnnnnnnnnnnnnnnnnnnnnnnnnnnnnnnnnnnnnnnnnnnnnnnnnnnnnnnnnnnnnnnnnnnnnnnnnnnnnnnnnnnnnnnnnnnnnnnnnnnnnnnnnnnnnnnnnnnnnnnnnnnnnnnnnnnnnnnnnnnnnnnnnnnnnnnnnnnnnnnnnnnnnnnnnnnnnnnnnnnnnnnnnnnnnnnnnnaaaattatatattaaaatagctttcttccactttgcaaatcatactttcccctaacgaacctgtcgacaggtctctaaattagaaagaattcagtggactttggtatatcttctttcttccagttccataggtactgaaagtgaaaaggggtgggaagcactgatctaaacctccctgtaccttagtcctatgagatcatgactagagtctgcctgtatgtttttcagccaacagctacatggaatcaaagtgtcaggctgtcatccaagaactgcgtaagtgttgtgctcagtatcccaagggaagatctgtcgtctgttcaggatttgaaaaagaagaggaagaaaacctaacacggaagtctgcatcaaagtaaagttcttctgaagtgctgctccatgtttccaccaaatgaattttttttatcctcctgactcttcaggccaggtagcagcaaatagcaaatgaaaaagtcagctacaaaagttaatgaatatgccatctatgcagaacaggcagaaatataaacacattaaaagacaaatatgtagaatgtaatatactgagctgctaaaataaacctgtttaagagaaaaatttgggttttgtactaaatgtattttaagactattagatatagggtattaatgaattctcttgaagttcaagccactagtgccattcatcaaatttaagtcatatgaggtatgttaggtgaaaggactcacttccagcatcacaattttgacgcctttttttttttttttttttttttttgagatggagtctcactctgtcatccaggc

SEQ ID NO: 80 - DNA, 53522 bp, Homo sapiens
tgtaaactttttgagacagcatctcaccctgttccccaggctggagtgcagtggtgtgatcatggctcactgcagcgtcaacctcctgggtctacttgatctgtaaacttcgagggaaggtgtaataaaccctcctgcaatgtctttgtttttcaaaatctttgtatttcacagtttagcttcgtgggttgatgttctattttgtttttgtgtgtgtgtgtgtgtgttttgtgtttttttttgagacacagtcttgctcttgttgcccaggctggagtgcaatggtgtgatcttggctcactgcaacttccacctcttgggttcaagagattctcctgcctcagccttccgagtagctaggattacaggcgccgccaccacaccccgctaattttgtatttttagtagagatggggtttctccatattggtcaggctggtctcaaactcccgacctcaggtgatccgcccacctcagcctcccaaaatgctgggattacaggcgtgagtcaccgcacctggccaatgttctatttttgagaacacaacagttcataatatattctacatagaccatacctgttatgtgtagataaacagactcttttcccatttaacaccttttgccttaggtttatttttctggtatcaatactggcacacttactttgtttgcagtttcctgtcttttttttttttttttttttttttgagacagagtctcactctgtcacccaggctggagtgaagtggcgggatctcggctcactgcaacctctacctcctgggttcatgcgattctcctgcctcagcttcccgaatagctgagaccacaactgtgtgccaccatgcccagccaatttttgtatttttagtagacacggggtttcaccatactggccaggatggctcaatctcttgacctcgtgatccacctgcctccgcctcccaaagtgctgggattacaggcatgagccactgtgcctggcctttttttttctttttgagatggagtctcactctgtcacccaggctggagtgcagtggggtaacctcaggtcactgcgacctccgcctcccgggttccagtgattctcctgcctcagcctcccgagtagctgggattacaggcacccaccaccatgcctggctaatttttgtatttttagtagagacggggttttgccacgttggccaggttggtctcgaactcttggcctcatgtgacccgcctgccttggcctcccaaagtgctgggattacaggtgtgagccactgtgcctggcctggctttcttgtttcttttctcctcttctagtttcccccttttaggctaacaattattcactgttaataaaaaccctcaggtctgtattttatcaagaaacatttccctcacgtcttcttccctgaaccaaacaagatctctggcacattttatttgctctgtctcaccacatggattttgtttttttgtttctttgttttttgagatggagtctcactcttgttgcccaggctggagtgccatggcacaatctcagctcactgcaacctccacctcctgggttcaagcgattctcctgtctcagcctcctgagtagctgggattacaggcgcgtggcaccacccccagctaatttttgtatttttagtagagacggggtttcaccatgttggtcaggctggtctcgaactcctgaccttgtgatctgcccaccttggcctcccaaagtgctgggattacaggcatgagccaccacgcccggcccccatggtttttcaaatagtttagaatttcatttccaggtaactaatttgcttctttaaacatatgtcttttctatttaagaaatcctttctaaacaattgcattttattccacaaccgccttcaaacaatcattgagacttggttaatctgttttgctcatttggcagcagtttcttgtggctgtttcttccctccactggagtccttgaatcttaagtctgtcatttgactgcaattaaaagctgggtttggaatacaatcgcagccttaccatccacctgctgtgtgacctggtaaatttctttttttttttttgagacggagtcttgctctgttgcccaggctggagtgcagtggcacaacctctgcctcccaggttcaagcgattctactgcctcaggctccctagtagctgggattataggtgcctgccaccatgcccagctgatttttgtatttttagtagagatgaggtttcaccatgttggctaggctggtctcgaacttctgatcttgtgatctgcccgcctcggcctcccaaagtgctgggattacaggcatgagccaccactcccagccagttctttttttcttttttccatttttttttttttcgagacaggatcttactcttttgcccaggcgggagtgcagtggcacaatcacggctcagcgcagccactgcctactgggctcacacgctcctccggcctcagcctctcgagtacctgggactacaagcgtgagccagtttggctaattttggctaatttttgtagaaacggggtctcgccatgttggccaggctggtctccaactcctggactcaagggatccaccttcctccccctctcaaagttctgggattaccggagtgagccactgtgccctgctggcaaatttcttaaactgtctgtgcctcagtgacctcatttaataaagggaataattgtagcacactttttctagagctgtgaagattcaatggaataaataaggcaataaatgaatggatggggaatgaaggatgtgggtttcctccctcttgtctttcaataagctctcaccatcaacctcccattgcctgttctctctcttccccctctctccctctgtctctctctcagccaggaaacctggggtagggaggcttggagccagcgggtgcgtcgggaggctgcgggtactgactcgggccgcgcacggagatcgcgggagaaggatccacaaccgcggaagaaggatcagggtggagcctgtggctgctgcaggaggaggaacccgccgcctggcccacaccacaggagaagggcggagcagatggcaccctgcccaccgcttcccgcccacgcactttagcctgcagcggggcggagcgtgaaaaatagctcgtgctcctcggccgactctgcagtgcgacggcggtgcttccagacgctccgccccacgtcgcatgcgccccgggaacgcgtggggcggagcttccggaggccccgccctgctgccgaccctgtggagcggagggtgaagcctccggatgccagtccctcatcgctggcccggtcgcgctgtggcgaagggggcggagcctgcacccgccccgccccccctcgccccgtccgccccgcgccgcgcggggaggaggaggaggagccgcggcggggcccgcactgcagcgccagcgtccgagcgggcggccgagctcccggagcggcctggccccgagccccgagcgggcgtcgctcagcagcaggtcgcggccgcagccccatccagcccgcgcccgccatgccgtccgcgggccccgcctgagctgcggcctccgcgcgcgggcgggcctggggacggcggggccatgcgcgcgctgccctaacgatgccgcccgccgcgcccgcccgcctggcgctggccctgggcctgggcctgtggctcggggcgctggcggggggccccgggcgcggctgcgggccctgcgagcccccctgcctctgcggcccagcgcccggcgccgcctgccgcgtcaactgctcgggccgcgggctgcggacgctcggtcccgcgctgcgcatccccgcggacgccacagcgctgtgagtagcgggcccagcggcacccgggagaggccgcgggacgggcgggcgtgggcgggttccctggcccgggacgggaagcaggacgcgggccaggacgctcccaggggcgaggctccggcgcggcacggcgggccctgctaaataaggaacgcctggagccgcggttggcacggccccggggagccgaaaaaccccgggtctggagacagacgtcccacccgggggctctgcagacgccagcgggggcggggcgcggaggccgcgctcagctgggaggacaaacagtcgctaattggagaggaattgggatgcggcctggggctgcggggtacccggagaggtggggatggctgtagggggcggcagggaagagttccaggaggtgtctggaaaaggatttgatggatgtgcaagaattgggctgatgcttaggaaggggcgatgaggtgggtccagaagaaggggggtgaacggtgtgagcaaagaccgtgaggctggaggctggccacgggaggtgtgaggggtaggggcagggtgggaggtgggctcgcgggtgggctggggtcatgaagggcctcaggcgctctgctattgggttccaaggctatcctgagaacaggggtgaggggggattgccgtggggggttaaagccttgtcatgttcgctttcgggagataaaaacaacaggtggcctttatggagacgctgcccagagccaggtctgtgccaggctcctgttgggggtcgtcatgcggaatcctgactctgaccatccgaggcatagggaccgtggagatttgcatttcacagatgaggaaacaggtttggagaggtgacacgacctgtcccaggcatcacagccgggatgtgcatagcaggggtttggaactatgaggtgcccaggacccagggttggattgaaaagggcggaggggactaagataagcagacagttgtccccagcgctggggagagtcttgggaccagtctgatgccttgtatttcccaggctccaggctcctcgccgggacagtgtctccttgggtgcgtgctggatccctgggggacgtggcacatccccaggcttgctaaacattgggtgggttctggcatttggttttgtaacgtttctgggtcactcccgcctgtggccacccttccttaggggagccgtgtgtccttggggctttgctgggtggtctcgagggtgggagaagaatgggttctcctggaccaatggagcccgtgcccctcggggccacattgctcctgcgctccctgactgcggacgcgtgtgtctcgcggctgtctctgtggagatggcctcctcctgcctggcaacagcacccacagaattgcatcagacctaccccacccgttgtttgtgatgctgtagctgagggctcctctgtctgccaggccggtcactggggactctgtccagggcctggtggttcctgcttcccagcacctgatggtgtccatgagagcagcccctcaggagctgtccgggagagaagggcgctggtggctgctgagcggagagcaaggcccgtgttctccaggcccttggcacagcagtggagcccccgcccctgccttgtgttgtcctcttaggctctggtcctggggtttggaggagggggaccctgggagttggtggcctgtcccagcctgagctggcaagattccgaatgccaggccccccaagtgtgcaacagggcacagggtgacctcatgtgggcaggtgggtgctgttctgtacacacctggggccgccgctgggagagttctggaaggtggggtgaggggacccatggcaaactagggccttaggaaggatgtgaaggccctggctggccccccaggccaccctctgtgctgtggggcagcccagccattttgctgtctaccctgcaaactcctcctcggggagacggctgggttttccccagggaagaggggtcaagctgggagaggtgaaggacacagatcacagctgctggcaggtgttcaagggtccaagagcgttgctgtctgggtgtcaccagtagccttcctggggggctcacgcaggtgcctctccacttgtggctccctggctgctgaagctcagcagggacagctgtgtccagttccaggtggaggacagccggggcttctgaggccacagcctgccttgggttaatgatgctgccgagaggtggtggcttttggaaaagatggcgtactgcaaaacgtgctgctctgcgtggctcgaagcttcgtggggagacgtgggcagagccgtggctgactcacagaccccccaccccagagcctgccctgccctccctgccccgacccttctccctcctgacccatgtgttttttttttttttttttttttttgagacagagttcactcttgttgccaaggctggagtgcaatggcacgatctcggctcatggcaacctccgcctcctgggttcaagcgctttttcctgcctcagcctcccgagtagctgggattacaggcgtgcaccaccatgcctggctaattttgtatttttagtagagacagggtttctccatattggtcaggctggtcttgaactcctgacctcagatgatccgcccgcctcggcctcccaaagtgctgggattacaggcatgagccaccacgcccagccctgacccatgttttgaaccaaattccagccacccttttatctgcaagcattttggagggcatcgcaatactgcagacccacctaacacaacagacagttccttcatgccaccgaaggcctggtgtgttcacatttttggtttaatagtttgaattaagagccaaataaggtccacacactgcaattagttgatgtctttttttttttctttttttttttttttttgagacggagtcttgctcttgtctccaggccgcagtgcagtggcatgatctcagctcaccgcaacctccgactccctggttcaagcgattctcctgcctcagcctcccgagtacctggtagctgggtttacaggcatgcaccaccgtgcccagctaatttttgtatttttagtagagacggggttttactgtgttggccaggatggtctcgatctcctgacctcgtgatctgcccacctcggcctcccaaagtgctgggattacaggcgtgagccaccgcacccggccaatgtcttttaaaaatatatactttttttttttttttgagacggagtttcgctcttgttgcccaggctggagtgcagtggcgcgatctcacctcacggcaacctccgcctcccgggttcaagtgattctcctgcctcagcctctccagtagctgggattacaggcatgtgccaccatgcctggctaattttgtatttttaggagagacggggtttctccacgttggtcaggctggtctcaaactcctgacctcaggtgatccgcctgccttggcctcccaaagtgttgggattacaggtgtgagccaacgcgcccagacaaaaatatatgtgtgtctttaaggctggtcaagcaaagcagtaggactggagaaagaatgaagaattctacctggctgtgatcaattcgttgtgaacaccactgtgcttggaccagctagctgatgtcttttgttttgttttgtttgagacggagtctggctctgtcacccaggctggaggacaatggtgtgatctcggctcactgcagcctccatctcccgggttcaagcgattctcctgcctcagcctcctgagtagctgggattagaggcgcgcgccaccacgcccggctaatttttaaaaatatttttagtagagatggggtttcaccatgttggtcaggctggtcttgaactcttggccttaggtgatctgcttgcctcggcctcccaaagtgctgggattacaggtgtgagtgatgtattttatttatttatttatttatttatttttattatttgagatggagtctcactctgttgcccaggctggagtgcagcagtgccatctcagctcactgcaagctccgcctcctgggttcacgccattctcctgcctcagcctcctgagtagcctggactggtgcccgccaccatgcccagctaattttttgtatttttagtagagacggggtttcaccgtgttagccaggatggtctggatctcctgacctcgtgatcctcccgcctcagcctcccaaagtgctgggattacaggcttgagccaccgcctgtcttttaaatgtccgatgatgtctaggagcttcccttcctctctttttccttgtgcaatttgttgaagaaactggctcctgcagcctggatttctcgctgtgtcttgggggtgccacctccatggtgtcacctccgtggtgctgtgagtgtgtgctttgtgtttcttgtaaattggtcgttggagccgacatcccattgtcccagaggttgtcctggctggcactggcctaggtgtagatgtcatcagctcagggccccctgctctaaaggccacttctggtgctggttgccactcaccctggctgggggtcacctgggtctgctgctgtctcgcaaatgctggggtccaggactgggcacatcgagggacttggtaggtgcttggttcactgatgtaaaatataggagcacccggggccttgccctttcccacctgcatccctgaatgacaggagagtgtgggagagtgtagggacagcaggcgcagaccccggggcccctgcctgggattggcgtcggggaagacaggcattctggagcgacccctaggcctgatgccttagagcgcaactgccagagacacagcttccttggggggctggccaggccacggaggggccctggctcccatttctggtccctggatcctgagagcgaggactagggattgtcaccaaggcctccatgagccctcagcagaaggagggccaccctcgagggctccgttatcactggagcccgcgttcaaccaacacgcagatgattctccaaggacagagatggatgatggggagggggctggcctggaaggacccccagtgcaggtgacattgaagccaggtttcaaagctcccacagggagctgcccagagagagtccccaaggggcaaggtgactcgggggcaggggtagggcctctgtcaggagagcctaggagaggcctgtgtcttctaggaagagccctggcagccgagcggaggcagtggtgaggacctgcatcctgcatgtccagctggcctcacccggggtccctgagccgggtcttacgtggctcccgcactcgggcgttcagaacgtgcctgcgtgagaaacggtagtttctttattagacgcggatgcaaactcgccaaacttgtggacaaaaatgtggacaagaagtcacacgctcactcctgtacgcgattgccggcaggggtgggggaagggatggggaggctttggttgtgtctgcagcagttgggaatgtggggcacccgagctcccactgcagaggcgactgtggagacagagagcacctgcaggtcatccatgcagtatcggcttgcatccagatcatacagggaacactatgattcaacaacagacagggaccccgtttaaacatggacaaggggtcactcacgcctggaatcccagcagtttgggaggccagggtgggtggatcgcttgagcccaggagtttgacaccagcctgggcaacagggtgagaccccggtctctaaaaaataaaagaacattggccgggcgtggtggtatgcatctgtggtcccagctattcaggagactgaggtgggacatcacttgagccgaggaggtcaaggctgcagtgagctgtgatcacaccactgcactccaggctgggtcacagagcaagaccctgtctcaaaaaaaaaaaaaaaaaaaaaaaaaaatcacaggatctgaacagagatttctccaaagaagacgcacagatggccaacagcgtgtgagaagatggtcggcctcattagtcatgagggaaacgtaaatcaaaaccactgtccagccgggcgcggtgcctcacgcctgtaatcccagcactttaggagagcagatggcttgaggccaggagtttgaggccagcctgggcaacatagcgagaccaataaatagatattagtggtggcgcctgtagtcccagctagttgggaggctgaggggggaggattccctgagtctatgaggttgagactgcagttagctgtgatggtgccactgcactccagcctgggcgactaggaaacggtctttaaaaaaaaaaaaaaaaaacagggtgggcgcggtggttcacgcctgtaatctcagcactttgggaggccaaggtggggggatcacaaggtcaggagtttgtgaccagcctgaccaacatggtgaaaccccgttctactaaaaatacaaaaattagcgaggtgtggtcgtgggcgcctgtaatcccagctaattaggaggctgaggcaggagaatcacttgaacccgggaggcggaggttgcagtgagccaatatcacaccactgcactctagcctggtcaacagagcgagactctgtctcaaaaaaaaaaaatgctgagcgtggtggcgcatgcctgtagtctcagctactttgggggctgaggcaggagaatcgcttgaacctgggaggcagaggtcgcagtgaggcaagattgcaccattgcactccagcctgggagacagagtgaaactctgtctcaaaaagaaaaggtctaggaagagtccgcaccctctccccgcggtggccacgccgggctccgcgctgagccctctgtgttcttgtctctccatacctcatcacggcaccgcagggttgcagccactcctggtctcattttacacaccaggaaattgaggctctttgagaagccgtggtgatgatttcatcagcatgctctggggcagacccctgcagccgcacagggtgcctggggcccacactagtgccctggtttatagacagacagaggtggcagtggcgcttccgagtcgggctgcgatgtgcttgcactccccgaggggctgaggggccctgcgcccaggtgcagctgcttgggtgctgccagcccctcccacctctccctccctgccagcccctcccacctctccctccctgccagcccctcccacctctccctccctgccagcccctcccacctctccctccctgccagcccctcccacctctccctccctgccagcccctcccacctctccctccctgccagcccctcccacctctccctccctgccagcccctcccacctctccctccctccagcccctcccacctctccctccctgccagcccctcccacctctccctccctgccagcccctcccacctctccctccctgccagcccctcccacctctccctccctgccagcccctcccacctctccctccctgccagcccctcccacctctccctccctgccagcccctcccacctctccctccctggctcatccctgctgtgtcccttctctctagtttcctgttcagtttcaggaaggaggctgggaacccagatgtagggaatttgcgccctggagtcagacctgggttcacgtcccagcgcctccacctctggtgtgaccttggtccagtctctcagcctcagtttcctcacctgtaaagtgggctccatgattagatgcaccctgcagggcagtgtagcagtgacctggctcagccactggcagccccaacaatcataccttgttaaagtagctctgtcggttccctcaggggttccgggggcccattcccctgtcctccatgcactgtgagacctgccctgccacagagcagagtgtaacagcctgagggtgagagccagacactgtgcctgtgcttagaccagacactggacgacgggagccagtgcagcctgggcgggtggactcctatggacccctcagcacccagcctcggtgccttcagcgcagggccgcgtggctgtgggggctcacaagacccggcccactcctgcttgtgcctacatctgggtgtttgcccattggtgccttttgacgcgttctggtgtgtgtgagacgtgcggggctgggaagtgttggcagagccgcgagtaccgtcctcactccttttgttcttttgacgtaagctggcgagtggcactgcctgagttccgctcagtgcccgccctgatgtgcggaccccgctgcattcttgctgttaggtggtggcggtgtgcgctgtcgctggtgggcaccgagagtctttgggagctttggggaggttgtgccaagcctgagcctcgacgtcccccttcccggctttctgttggctcttctgaggccagggcatctctatgagggcctcctgctggagccgtctctgtggatctcctctgccatcctggcccatgagtgggtgatgcgctggccaccatctggtgacagtggccgggcaccgctgccaaatgtgggtcccgcatctgcaagcccctccctgggtcccctagggtatggggtggttctgccactgccctcgctcccccaccttggggtgcctctccccctgctcgtgggggagaccctgcctgggatctgctttccagcaaggaatatactttggagggagacacacatgttcttttctggagctctgcagtggccacggcagcccagcccgccaagcaccctggaatgaaaacatcccgctgctgtctgggcctggcctgcactctgctgcctgcgctccagctggctgaggccgggcacgtctgcgggcacagcagcgggggcgccacagtctccctgcagagtgagcgcagctggaaaatgcagctcacgccctttcccagaacacctcgctcttcatggcttggcagctgtccttgcctaggggccagggtgcccaggcactggtggcaggagaagggctacatctggggctgaggcgggctgggtccttttctccctgcagctcccgaggcccagccctggcccagcctggcattcctgaccttagcagcgccatgatctgaagacaggctggcttctgtgaggccacctcagaaagggctttgtgcccaggcagaggcggaagccagctcttccttctggttgaggcaggaatgaggccagcgctgggcaagcccatgcccagggaacgtcacagctgtgggagtacaggggctccgggttctgagcccgtccactgtgcatcgtggccctggcctcaggatggctcgtaccatcattggctgtgcccacagccgagtgggtgatgggattccggctgccccgctggatctgtgctgctgccctctccagggcactgctgtgcccgcacagccgggcgcagatggccagtttgcttgcccccccccccaccatcctcttcctaccttggcttcctccattgacacactggaccctgctggctgcccggggaggtgtttgggggatggtgttgggggaggaggagggccccttgagcctcagtgtgcccatcaggagcgtaaggtcagtgcagcacctgcccacacaggctgtgaagggtgggagtggagagggatgcaagggggtcacaacgcctggctccatgtcagctgcgtgcaggggcaccaggagccggccctcattctccccttgaactggaagggtggccccgaccccagcggcaggtagcatacgtatgaagcgctctccttcctacaccccacaggtgggctcgtctccagacggccctttttgagctggctgtgtttttccatctgtgtaggcaaggacatcgcagactcccctttctcatctccctcgttcagcctccgaggccggagtctccatccctgtgcctgcctgtgggtcccgggaggacctgaggctgcccatgtcacccccggcatctcatcctggggacagttcagccgtgggagggatctgtaaggacagaatgccgctgagcctggggctccccagctagtctcacaccccgtgtctgggacccagagaccctcgtgcagggctctgttgcttggggcctggcagcctcgtcctgtatcagaggctgccacccccacccctcgtggggccagggttgtggccggcctccctggccctccccatggaagtggtaggcggagccagcagccatctgcccagcccggggctgcactgttttttttcaaatgagcaccgtcccaaactgcagcccgttaatttaaacaggatcatttccggccctggaagccgcctcactctccttaaatagaaaggagcacagcgcagagggaaacagatgaggtcatggctcggctggcccagcgaggaaggggccgcagtgggggtggcactgccgcctgtcccctgtcctctccagcgcccacactgcagcccatttcctcaccctgggcctgctctcgggagggacgggcctgggggtcctcttgctgggcggaggggaaccagctcctccaggagaggacggggcctggcagggggcatggggcctccctgggtctggcgtcctgtcctgcccctgccgagggaggagcggttacataagctccgcaggcggcccctccgagccggtccccccagcccagtttccagtgaggcggccagcgcgggcgggggtgccgggcctggcgcacacccgctgctgaccacacgtgtctggaatgtgcagatgtttctttgggggctccgtccggcccccagaccccactcagcatctggtctggggagtgggcgcctggggcactcagctctgagtgtgagactctgaggcaggtctggtttgtctggggccattccctctgctgtggattgggagggccccgggagctgccccacacccagggaagttctcctcagtcccactgttgcattccccgaccccggctcccccggcccaggagcgcctgtggggcagaaggcccagccccaagacttcccggccctgccagcctcaggcttcacccaccctcgcgccaactgtgggcagagcccagggggagggcaggagagccagcgcctggctgggaacacccctgaggggccgaggctccagggcgagggggcccgacctggggttcacacgcccgggtggcgggcagacccgctgcagcatgagacacgtgtcagctacctcgggccggcaggctggccctgctgcccacagccctgggacgtggccccacctgtgacgggtgtggaggggcagcctccaggcctggccacaccctctgctgttgctgctcctgctccaggattggcaagggtgctgggaaggggtgaagacccgtactgtggccacacacctgggacttccttctccacccagtggtgccccagcagccgctaaggagcccgctgggtcccacgctaggatggtcctaactcctcccgccttccagatcggacgctcggcgctggggaccccttgtgtcccggggctggggcaccgtcctgcccccatgggggtgtactcctcccgacaagcttggcttcagcttccctgggagcacatcctggccctcgggcacccatcaggctgtccctgtgcacctggctcccacccttccagctcatagcaggaactggggtgaggagtgcgtggggcagcaagggcctgggaccccagaggaccctgcactctgctctgtgctcttgcctgggcttagggccgctcggtggtcctgctgccagatgcctgggccctgctgtgtcccccatccttgcagggaaccagaacgtgggggcagggcatcagacagcggcgatgatgtcacctggcgggtgcagaggaagcccgaggggcggggtgggggggctggcgcgaggctgcctggctaggccttggcgttcccccagaacggcgatggcaaaagcagatggagacgtgaaaaagtacgggagcaagcgaggtgaggactccacggggacccctgtgctgttccctgtccctgaagcccacacctgagtcctgcccagggcagatgcttccacacccagggggcacctgagtcctacccagggcagacgcttccacaccctgggggctgggggactgcacctggctcctgtctgggccccagcttcattccactgccctgggccctgggagctcggccgagcggggtccccaagaccttgctgcatttctgggccttgggctggggtgagggccgggagaaggagccagcctggagcctggcacgcagggagtgcatggccagaaccggtgacaggcagggctgcctgctggcgtggaagaagtgtccatggcacccccaggcctggttcacagtgggatgggcggggagccggggggctctggggtcctcggctgacctgcccccacccctgccctggcttgtcagctcccagcagcagccactcttgatggattttccagaaaatgaggtgtggccaaacatcttcaggcttttccttctttcctttctcccgtggcctgggtgggagctgctccccatgcctgggggcaggtgcgagagcctgtgcccctccctggggcagtttcacagctgtgtcccttccagggggcctgcctgtgttcaccgtggcctctgcagcacctctcgccccttagggctcctgcgcctcgggtcccggtgcctcatttctccctaaagcattggttctgctgccgccgcagccgctggaaagtccctcctcaggtctaactgcagttcctcacggcacagtgttccccctcgggcatggtgcttgggcagtgggtgtgagtccagctgcctcaccctgtctcgagaatggcctcttgctggtctcccagccaccaccctgtcccaccccacggcggggatggtgtggatgcctagcagcgcggctgtgggcccacccatccttatgggcagtggggagcacctcagcccgtgtccctaccttggtgtagaggaggggacggcagagaagcagggttcagttaggggggaagtggtggccctgccggaggggccgttccctgtgtgcctggcccccagatcctctcccctcccggagcccagggcacaggcataggctctctgagtgtcccacagcccctgggggaagggaactgcacccccaaccgtgccctccatccgcagatggaacgagaagctccgggagccagtgcccagcgtctcatctgtctgggcacccagcccaggtgagggcctggctccaccgtccgtggctggtgctgcttcctggcacggagaaggcctcggctgctctgtcccctcagctggggtggcctctggtccccttctttgttggttcccttctcaagctcttgccctggccccgggccccaccgggcagcctgtgtgtgcgtctctcctgcgccgggtaggctcctgtgggagcggagctccggtgggaggagcagggctggaggctggcaggggctgggcgggtgttcagggatggaggccgccccggcttggggctggctgccgggtggtcattgctgggaagagcaagtctaggcggaggcacctgctgggtcactcgtggggagggtgacacctggggaagtagaggcccgtggcaggaggtgaggcctcggggtcctggggagcaggggggtggtgtgcagacctgcggagccatagtcctgtgccaggagcactactgggagtgcgtgggaccaggaggggtgcccagggtgggcggcagagtgacccccgaggtgcttgaggccgaggggaggtggagttctcggtttgccccagctctctgtctactcacctccgcatcaccagctccaggacctggtttgtaactcgggcagctctgaaaagagagacatgctgccgccctgtggtttctgttgctttttcttcactgactactgacatgggatgtttttcctacggctgtgaccaattgtgcttcttctaattgcctggtttttctttttttgtttttggagttttctctttctttcctccctccctctcaccctccatcctttttttttttatttttattttttgagatggagcttcactcttgcaggatggggtgctggagtgcaggggtgcgatctcagctcactgcaacctctgcctcgcgggttcaagtgattctcctgcctaagcctcctgagtagctggaattacaggtgcttgccaccacgcccgactaattctgtagttttggtagagacagggtgtctccgtgttggtcggtctggtcttgaactcctgacctcaggtgatgcgcccgcctcagcctcccaaagtgctgggattacaggcaggagccattgcacccggctctttccccttctccttttcttctctctctcctccctttctttcttttcttttcttttttttttcttttgagatggagtctcgctctgtcaccaggctggattgcagtggcgtgatcttggctcactgcaaccttcgcctcccgggttcacgtgattctcctgcctcagcctcctgagtggctggcactacaggctcccgccgccatgcccggctaatttttgcatttttagtagagacagggtttcaccctgttggccaggatggtctcgatctcttgatctcatgatccacccaccttggcctcccaaagttctggcattacaggagtgagccaccgtgcccggccatctttctttccttgctttctctttgttttctttcgagaccgggtcttgctctgtcgcccaggctggactgcagtggcacaatcatagctcactgcagcctcgacttccctggctcaagcgatccttcctcctcagccccccgagtagctggaactacagttacacactaccatgcctggctgattctttttttccttgtagagatggggtcttgctatgctgtccatcctggtctcaaactcctggccttcccaaagcactgggtttacaggcataagccaccacacccagtttccttttcttctttttaactggaatagttgacgttttctttattagctgtgtgtcaggagggtatttttggcctttagtatgtcgtgtaagttgctagtgcttttctgagattgtagtttgttttctaattttatttatattttgcgtagaagttgtgtattttagatggagttaggtcggctggtctttgatgttttatttattaattatgtatgtatttatttatttttgaggtagagtctcgccgtttcacccaggctggagtacagtgatgcgatctcagctccctgtagccttgacctctctgggctcaagtgatttttctctcctctacctcccgagtacttgggaccccaggcgcatgccgccatgcctggctaatgtgtattttttgtagatacggggtctcactgtgttgcccagggtggtttcaaaatcctgggcccaggcgatccttccgtctcagctcccacggtgctgtgttaccggcgtgtgcccagtgcctggccgtcttggaggtcttgtttctctgggtttatgcctcgaggtggcgcctgctcccctgtgctccctggtagcctggtagtgagcctgcttctcacacagtcatacctggttgtggtcccacagtgggaccaccctgttgggttcagaacaggagatgggggcccctcgagtctgtgtgggggctgtggacagggttgggagaccttggctctgtgggggactgtggacaggggatggggggccttggccctgcgtgggatgggttgggggtccgtgcccttcctggccctgggtggacaggtccatgtggcactcggcatagggctgagatgggtgcagagggctgaggcccccaggcctctcctggcttggtttccccagatgagtgttcatttgggtcttccatcagaaagtcccctcctgacctctgggagtggggagctcaagggtgggaggccatagcttggggatgctggcaatgtgtgggatgggcccagggaaggcctctggcctactaggggctctggccctgacccacggccactcactcctcagagacgtctcccacaacctgctccgggcgctggacgttgggctcctggcgaacctctcggcgctggcagagctgtgagtgtcccccagtcgtgccagcatgcggggctcactccgggtgggctggcggcaccgcctcttgctgctcagctgtgggggcttccatcagctttgccgaatcccccgtctcttccagggatataagcaacaacaagatttctacgttagaagaaggaatatttgctaatttatttaatttaagtgaaatgtaagttgtggttctttgggtggggtcctggctggaccccaggcccccaatatcccttctgccctcccagttggtccgtgtccccttccaggcttgagaccagatcctgggggcagttcactgcctgcttggagccccccagtgccggcttggttggggcaggggaggcggtgctgtcagggtggctccagggcctggttgccagtggggggctggcatagacccttcccaccagacctggtccccaacacctgcccctgccctgcagaaacctgagtgggaacccgtttgagtgtgactgtggcctggcgtggctgccgcgatgggcggaggagcagcaggtgcgggtggtgcagcccgaggcagccacgtgtgctgggcctggctccctggctggccagcctctgcttggcatccccttgctggacagtggctgtggtgagtgccggtgggtggggccagctctgtccttcccagccaggtgggacctgggccctgcagacactgggcagggctcaggaaggcctctctggggggggcctccgggccaagggaacagcatgggagcctgtgagtgcggcgggcggatgtgggggcgtggggtggagccaggaggagcagaacccggggtccagtggctgcctcttctaggtgaggagtatgtcgcctgcctccctgacaacagctcaggcaccgtggcagcagtgtccttttcagctgcccacgaaggcctgcttcagccagaggcctgcagcgccttctgcttctccaccggccagggcctcgcagccctctcggagcagggctggtgcctgtgtggggcggcccagccctccagtgcctcctttgcctgcctgtccctctgctccggccccccgccacctcctgcccccacctgtaggggccccaccctcctccagcacgtcttccctgcctccccaggggccaccctggtggggccccacggacctctggcctctggccagctagcagccttccacatcgctgccccgctccctgtcactgccacacgctgggacttcggagacggctccgccgaggtggatgccgctgggccggctgcctcgcatcgctatgtgctgcctgggcgctatcacgtgacggccgtgctggccctgggggccggctcagccctgctggggacagacgtgcaggtggaagcggcacctgccgccctggagctcgtgtgcccgtcctcggtgcagagtgacgagagcctcgacctcagcatccagaaccgcggtggttcaggcctggaggccgcctacagcatcgtggccctgggcgaggagccggcccgaggtgagtgtctgctgcccactccccttcctccccagggccatccagatggggcagagcctggtacccccgtcttgggcccacactgaccgttgacaccctcgttcccaccggtctccagcggtgcacccgctctgcccctcggacacggagatcttccctggcaacgggcactgctaccgcctggtggtggagaaggcggcctggctgcaggcgcaggagcagtgtcaggcctgggccggggccgccctggcaatggtggacagtcccgccgtgcagcgcttcctggtctcccgggtcaccaggtgcctgcccccaccccccgaggggccataggttgggagatctctgaagcactggggcagagactgcggctggggagtctcaggaggaaggaggtgggagctgggccggccctggtgagcaggtggcgccggccggtggggccgttcctgtcagctctgcagatgcagaggtggacatgagctgggggcagcctccggacactcctgggcacgccatacgggaggtggcctgcacggggatccctgccggtacccacaggccccgtgggtgggtgctgctgtgagcctgggctggtgggccctggtctccgggctctgagcctcagtttccccatctggaaagggggacagtgatggggctcccagcgggctgctgtgagggtgggaggatggaggagtgccctgagccccctgccatcccacacccgcccccaggagcctagacgtgtggatcggcttctcgactgtgcagggggtggaggtgggcccagcgccgcagggcgaggccttcagcctggagagctgccagaactggctgcccggggagccacacccagccacagccgagcactgcgtccggctcgggcccaccgggtggtgtaacaccgacctgtgctcagcgccgcacagctacgtctgcgagctgcagcccggaggtgtgcggggggccaggcaggggcctgagacgctggctgtggttaggggcctgccgagcgcccgcggtggagcctgggctgaggaggaggggctggtgggggggttttcgggcggctcggtccccagtctgttcgtcctggtgtcctgggccctggcccggcgcctcactgtgcactcgccaccccaggcccagtgcaggatgccgagaacctcctcgtgggagcgcccagtggggacctgcagggacccctgacgcctctggcacagcaggacggcctctcagccccgcacgagcccgtggaggtagtcggccccccacgttctacaacctgccctcctgcctgcccctggaggccttgcctgccctgcccactgtgggtctcgccaaaaaacttgggggccttaatgttgcttgtgcccagtgaagatggttgggaaaatccagagtgcagagaggaaagcgtttactcacattacctccaggccttttctctgagcgtgtgtgagttattcctgaaaggcaggtcaggggtcctgccccccatggacagtttccaccggagtcttcctctcgagcgacaggagccaggcctgtgggggtctgatggctcgctctccttccctcccctcttcctgggaagttcgggtagggggagtctgggcttcaggctgggatggggtctgtggagctgaggcggccccctgcccaccaggtcatggtattcccgggcctgcgtctgagccgtgaagccttcctcaccacggccgaatttgggacccaggagctccggcggcccgcccagctgcggctgcaggtgtaccggctcctcagcacagcaggtgggactctgggtggtgggtggtgggtggtgggcgccgcaggactcggggtggcctctctgagctttcacgtctgctggtcctgtggccaccagagtggttcccagtcttaggtggacagagcaggggttccagagacaccagctcattccaggtgtcctgggggtggattgggtggggcctgcctgggggccggcctgggtcagtcggctggccggagacggacgcagcactgggctgggagtgctgcccaggtggggagacctgtcctcacagcaaggccaggattgctggtgcaggcagttgggcatctctgacggtggcctgtgggcaaatcagggccccaacaccctcccctcctcacagggaccccggagaacggcagcgagcctgagagcaggtccccggacaacaggacccagctggcccccgcgtgcatgccagggggacgctggtgccctggagccaacatctgcttgccgctggacgcctcctgccacccccaggcctgcgccaatggctgcacgtcagggccagggctacccggggccccctatgcgctatggagagagttcctcttctccgttcccgcggggccccccgcgcagtactcggtgtgtggccctgacctgggtctgttccctgcatctcctcaggccaccttcctgtctgctgcccagggtctgggtctgtgcaccagacacacccagcctgcaggcccctcccacgtccttgccacctctgacctccgacctctgcagtgccctcggccctctcccagtgggagaagctctcgcctgggcccttggcacgagctgtgcctcctcttcctctctcccagcacagctgctccttcctgtctgccaggtcttggcctgtgtcctctccccgtgtgtcccccggtctgcaactgtcctgcctgtccttgtcacgagcactgtggggaggctccttgaggtgtggctgacgaagcggggagccctgcgtgtccaccctcatccgtcgtgcgggggtccacgggccatgaccgtgaggacgtgatgcagccctgcctccctctccacaggtcaccctccacggccaggatgtcctcatgctccctggtgacctcgttggcttgcagcacgacgctggccctggcgccctcctgcactgctcgccggctcccggccaccctggtccccgggccccgtacctctccgccaacgcctcgtcatggctgccccacttgccagcccagctggagggcacttgggcctgccctgcctgtgccctgcggctgcttgcagccacggaacagctcaccgtgctgctgggcttgaggcccaaccctggactgcggctgcctgggcgctatgaggtccgggcagaggtgggcaatggcgtgtccaggcacaacctctcctgcagctttgacgtggtctccccagtggctgggctgcgggtcatctaccctgccccccgcgacggccgcctctacgtgcccaccaacggctcagccttggtgctccaggtggactctggtgccaacgccacggccacggctcgctggcctgggggcagtgtcagcgcccgctttgagaatgtctgccctgccctggtggccaccttcgtgcccggctgcccctgggagaccaacgataccctgttctcagtggtagcactgccgtggctcagtgagggggagcacgtggtggacgtggtggtggaaaacagcgccagccgggccaacctcagcctgcgggtgacggcggaggagcccatctgtggcctccgcgccacgcccagccccgaggcccgtgtactgcagggagtcctagtggtgagtatggccgaggctccaccaccagcccccaggcaggtgcctgcagacagggtgctcacacagggcgtgaggcctggcttcccagtgagggcagcagcccagttactggggacgtcggccccgggcaggtcctgctggctggctcctcgggctacctggtgggctttaaattcctggaaagtcacggctctgacagtggctccgctaactcattccactgtctcatttcacaaaatgaatttaaaactctgctccctgacctcacacgagcccccgtgagtctctcacgccctctgctgtgttctcgcctggctaaagcgagtggcttttgaggtggagtctgaacccctgatgggaaactgcgggctgcccgcggtgccaccatgctgggtacatgggggacagggctgtctccatcttgcgggtacctgcctcttcaccaggggccttgggaggggccatcagaaatggcgtgacctgtgcagcctgtcctgggttctgtaagccagtgtaggtgcctcccctcactgctccgagctctctgggtgaggagctggggcaagagcgccgggagggtctgagaagactcagagagaggtggactctttgtagctggtactaggtttgctttacagatggggaaactgaggcacagagaggttgaggcattagtagtactacatggctggctggagagccggacagtgagtgtcccagcccgggcttggctcccatggcatgcagagccccgggcacctcctctcctctgtgccccgcgtgggactctccagcccgacgggaggtgtgtccaggaggcgacaggctaagggcagagtcctccacagagcccaggctgacaccattccccccgcagaggtacagccccgtggtggaggccggctcggacatggtcttccggtggaccatcaacgacaagcagtccctgaccttccagaacgtggtcttcaatgtcatttatcagagcgcggcggtcttcaagctctcagtaggtgggcgggggtggggaggggaggggatggggcggggcagggcgggggcgggctccaccttcacctctgccttctgctctgcttcatgctgcccgaggacgctgccatggctgtgggtgagtggagggagggacgccaatcagggccaggcctctcacctgccacctgggctcactgacgcctgtccctgcagctgacggcctccaaccacgtgagcaacgtcaccgtgaactacaacgtaaccgtggagcggatgaacaggatgcagggtctgcaggtctccacagtgccggccgtgctgtcccccaatgccacgctagcactgacggcgggcgtgctggtggactcggccgtggaggtggccttcctgtgagtgactcgggggccggtttggggtgggcaccaggctcttgtcccagccccagcctcagccgagggacccccacatcacggggttgcttttctgagcctcggtttccctgtctgttgggaggtaactgggtgcacaggagccctgaggctgcacgggagccgggagaggcctcagcacagccgggtgggccctgaatggaggcccggggcgtgactgcagagtggagcctcggctgggtcccaagcaccccctgccccgccaccgcccacccctgtcccggttcactcactgcgtcccaccgccccggcaggtggacctttggggatggggagcaggccctccaccagttccagcctccgtacaacgagtccttcccggttccagacccctcggtggcccaggtgctggtggagcacaatgtcatgcacacctacgctgccccaggtgagggatgagggggtgagggggccactgcctttcaggctctgagcacgggtccccccagctccccagtcaagctgccccccttcctccccaacagccctcactgtgacctcacctgggctgatggcttaggccctactggggtgagggaggggccaggcgtggggggagtggacagggaagctgggcccctgaactgcgccccccgccctccccgggcctggctcttgctgctctgctgccccgagtgcagctgcacttggaggcggtgcgtcctcgccaggcagccctcagtgctgctacacctgtgctccgtcccgcacgtggcttgggagcctgggacccttaaggctgggccgcaggtgcagccgttcaccccgggctcctcaggcggggggcttctgccgagcgggtggggagcaggtgggggtgccgcggctgccccactcgggcctgtccccacaggtgagtacctcctgaccgtgctggcatctaatgccttcgagaaccggacgcagcaggtgcctgtgagcgtgcgcgcctccctgccctccgtggctgtgggtgtgagtgacggcgtcctggtggccggccggcccgtcaccttctacccgcacccgctgccctcgcctgggggtgttctttacacgtgggacttcggggacggctcccctgtcctgacccagagccagccggctgccaaccacacctatgcctcgaggggcacctaccacgtgcgcctggaggtcaacaacacggtgagcggtgcggcggcccaggcggatgtgcgcgtctttgaggagctccgcggactcagcgtggacatgagcctggccgtggagcagggcgcccccgtggtggtcagcgccgcggtgcagacgggcgacaacatcacgtggaccttcgacatgggggacggcaccgtgctgtcgggcccggaggcaacagtggagcatgtgtacctgcgggcacagaactgcacagtgaccgtgggtgcggccagccccgccggccacctggcccggagcctgcacgtgctggtcttcgtcctggaggtgctgcgcgttgaacccgccgcctgcatccccacgcagcctgacgcgcggctcacggcctacgtcaccgggaacccggcccactacctcttcgactggaccttcggggatggctcctccaacacgaccgtgcgggggtgcccgacggtgacacacaacttcacgcggagcggcacgttccccctggcgctggtgctgtccagccgcgtgaacagggcgcattacttcaccagcatctgcgtggagccagaggtgggcaacgtcaccctgcagccagagaggcagtttgtgcagctcggggacgaggcctggctggtggcatgtgcctggcccccgttcccctaccgctacacctgggactttggcaccgaggaagccgcccccacccgtgccaggggccctgaggtgacgttcatctaccgagacccaggctcctatcttgtgacagtcaccgcgtccaacaacatctctgctgccaatgactcagccctggtggaggtgcaggagcccgtgctggtcaccagcatcaaggtcaatggctcccttgggctggagctgcagcagccgtacctgttctctgctgtgggccgtgggcgccccgccagctacctgtgggatctgggggacggtgggtggctcgagggtccggaggtcacccacgcttacaacagcacaggtgacttcaccgttaggtggccggctggaatgaggtgagccgcagcgaggcctggctcaatgtgacggtgaagcggcgcgtgcgggggctcgtcgtcaatgcaagccccacggtggtgcccctgaatgggagcgtgagcttcagcacgtcgctggaggccggcagtgatgtgcgctattcctgggtgctctgtgaccgctgcacgcccatccctgggggtcctaccatctcttacaccttccgctccgtgggcaccttcaatatcatcgtcacggctgagaacgaggtgggctccgcccaggacagcatcttcgtctatgtcctgcagctcatagaggggctgcaggtggtgggcggtggccgctacttccccaccaaccacacggtacagctgcaggccgtggttagggatggcaccaacgtctcctacagctggactgcctggagggacaggggcccggccctggccggcagcggcaaaggcttctcgctcaccgtctcgaggccggcacctaccatgtgcagctgcgggccaccaacatgctgggcagcgcctgggccgactgcaccatggacttcgtggagcctgtggggtggctgatggtggccgcctccccgaacccagctgccgtcaacaaaagcgtcaccctcagtgccgagctggctggtggcagtggtgtcgtatacacttggtccttggaggaggggctgagctgggagacctccgagccatttaccacccatagcttccccacacccggcctgcacttggtcaccatgacggcagggaacccgctgggctcagccaacgccaccgtggaagtggatgtgcaggtgcctgtgagtggcctcagcatcagggccagcgagcccggaggcagcttcgtggcggccgggtcctctgtgcccttttgggggcagctggccacgggcaccaatgtgagctggtgctgggctgtgcccggcggcagcagcaagcgtggccctcatgtcaccatggtcttcccggatgctggcaccttctccatccggctcaatgcctccaacgcagtcagctgggtctcagccacgtacaacctcacggcggaggagcccatcgtgggcctggtgctgtgggccagcagcaaggtggtggcgcccgggcagctggtccattttcagatcctgctggctgccggctcagctgtcaccttccgcctgcaggtcggcggggccaaccccgaggtgctccccgggccccgtttctcccacagcttcccccgcgtcggagaccacgtggtgagcgtgcggggcaaaaaccacgtgagctgggcccaggcgcaggtgcgcatcgtggtgctggaggccgtgagtgggctgcaggtgcccaactgctgcgagcctggcatcgccacgggcactgagaggaacttcacagcccgcgtgcagcgcggctctcgggtcgcctacgcctggtacttctcgctgcagaaggtccagggcgactcgctggtcatcctgtcgggccgcgacgtcacctacacgcccgtggccgcggggctgttggagatccaggtgcgcgccttcaacgccctgggcagtgagaaccgcacgctggtgctggaggttcaggacgccgtccagtatgtggccctgcagagcggcccctgcttcaccaaccgctcggcgcagtttgaggccgccaccagccccagcccccggcgtgtggcctaccactgggactttggggatgggtcgccagggcaggacacagatgagcccagggccgagcactcctacctgaggcctggggactaccgcgtgcaggtgaacgcctccaacctggtgagcttcttcgtggcgcaggccacggtgaccgtccaggtgctggcctgccgggagccggaggtggacgtggtcctgcccctgcaggtgctgatgcggcgatcacagcgcaactacttggaggcccacgttgacctgcgcgactgcgtcacctaccagactgagtaccgctgggaggtgtatcgcaccgccagctgccagcggccggggcgcccagcgcgtgtggccctgcccggcgtggacgtgagccggcctcggctggtgctgccgcggctggcgctgcctgtggggcactactgctttgtgtttgtcgtgtcatttggggacacgccactgacacagagcatccaggccaatgtgacggtggcccccgagcgcctggtgcccatcattgagggtggctcataccgcgtgtggtcagacacacgggacctggtgctggatgggagcgagtcctacgaccccaacctggaggacggcgaccagacgccgctcagtttccactgggcctgtgtggcttcgacacaggtcagtgcgtggcagggccgtcctccatgcccctcacccgtccacacccatgagcccagagaacacccagcttgccaccagggctggcccgtcctcagtgcctggtgggccccgtcccagcatggggagggggtctcccgcgctgtctcctgggccgggctctgctttaaaactggatggggctctcaggccacgtcgccccttgttctcggcctgcagagggaggctggcgggtgtgcgctgaactttgggccccgcgggagcagcacggtcaccattccacgggagcggctggcggctggcgtggagtacaccttcagcctgaccgtgtggaaggccggccgcaaggaggaggccaccaaccagacggtgggtgccgcccgcccctcggccacttgccttggacagcccagcctccctggtcatctactgttttccgtgttttagtgctggtggaggccgcacgctctcccctctctgtttctgatgcaaattctatgtaacacgacagcctgcttcagctttgcttccttccaaacctgccacagttccacgtacagtcttcaagccacatatgctctagtggcaaaagctacacagtcccctagcaataccaacagtgaggaagagccccttcccaccccagaggtagccactgtccccagcccatgtccctgttgctggatgtggtgggccggttctcaccctcacgctcccctctctggaccggccaggaggcttggtgaccctgagcccgtggtggctgctcctgctgctgtcaggcggggcctgctggtgccccagagtgggcgtctgttccccagtccctgctttcctcagctggcctgattgggggtcttcccagaggggtcgtctgaggggagggtgtgggagcaggttccatcccagctcagcctcctgacccaggccctggctaagggctgcaggagtctgtgagtcaggcctacgtggcagctgcggtcctcacacccacacatacgtctcttctcacacgcatccccccaggggccctcagtgagcattgcctgcctcctgctagggtccagctgggtccagtacaccagaacgcacactccagtgtcctctgccctgtgtatgcccttccgccgtccaagttggaaggtggcaaaccggatgagtatcctgggagggagtgagctcaccggcagtggccaggcccctgggaaacctggagtttgggagcagcatcctccatgggtcccccagtccttccagcaggccaaatagacctgtgttggaggtaaccccactcccacgccaggtgctgatccggagtggccgggtgcccattgtgtccttggagtgtgtgtcctgcaaggcacaggccgtgtacgaagtgagccgcagctcctacgtgtacttggagggccgctgcctcaattgcagcagcggctccaagcgaggggtgagtgttgagcggggtgtgggcgggctggggatgggtcccatggccgaggggacggggcctgcaggcagaagtggggctgacagggcagagggttgcgccccctcaccaccccttctgcctgcagcggtgggctgcacgtacgttcagcaacaagacgctggtgctggatgagaccaccacatccacgggcagtgcaggcatgcgactggtgctgcggcggggcgtgctgcgggacggcgagggatacaccttcacgctcacggtgctgggccgctctggcgaggaggagggctgcgcctccatccgcctgtcccccaaccgcccgccgctggggggctcttgccgcctcttcccactgggcgctgtgcacgccctcaccaccaaggtgcacttcgaatgcacgggtgagtgcaggcctgcgtggggggagcagcgggatcccccgactctgtgacgtcacggagccctcccgtgatgccgtggggaccgtccctcaggctggcatgacgcggaggatgctggcgccccgctggtgtacgccctgctgctgcggcgctgtcgccagggccactgcgaggagttctgtgtctacaagggcagcctctccagctacggagccgtgctgcccccgggtttcaggccacacttcgaggtgggcctggccgtggtggtgcaggaccagctgggagccgctgtggtcgccctcaacaggtgagccaggccgtgggagggcgcccccgagactgccacctgctcaccaccccctctgctcgtaggtctttggccatcaccctcccagagcccaacggcagcgcaacggggctcacagtctggctgcacgggctcaccgctagtgtgctcccagggctgctgcggcaggccgatccccagcacgtcatcgagtactcgttggccctggtcaccgtgctgaacgaggtgagtgcagcctgggaggggacgtcacatctgctgcatgcgtgcttgggaccaagacctgtacccctgcctggagctttgcagagggctcatcccgggccccagagataaatcccagtgaccctgaagcagcaccccgaccttccgctcccagcagccacacccaccgggccctctccggcgtctgctttccacaatgcagcccccgcccaggagggcccatgtgcttaccctgttttgcccatgaagaaacagctcagtgttgtgggtcagtgcccgcatcacacagcgtctagcacgtaactgcaccccgggagtcgtgggcatctgctggcctcctgccggcctcctgcgctgctgacagcttgctgtgccccctgcctgccccagtacgagcgggccctggacgtggcgcagagcccaagcacgagcggcagcaccgagcccagatacgcaagaacatcacggagactctggtgtccctgagggtccacactgtggatgacatccagcagatcgctgctgcgctggcccagtgcatggtaggatggccccacctgctcaccctgccccgcatgcctgccagggcactgggttcagccccccagggcagacgggcagcttggccgaggagctgagcctccagcctgggctccttcctgccatggcgttcctcggtctctgacctgcttcagtagcctcagccgttctgtcctgtgtgaacgcagggtgcctctcgggggacccagggtgtaaagaggggcccagatgtggggagggactaagaagatgctgctctgtgccctccactctcccctcccctcccctcccccttccctcccctagcccctcccctcctcccctcccctagcccttcccctcctcccctcccctagccctttcccttcttcccccccagcccttcccctcctcccctcccctagcccttcccctcctcccctcccctaccccttcccctcctcccctcccctagaccttcccctcacctcctcccgctgagcccctccactcgtcccccagcccctccctcccctagcccctcccctcccccttcctcccctcctccccctcccctcctccccctccctcttcctccccctcccctcctcccccttcctcccctctcctccccctcccctcctgtcccccctcctcccctcctccctcctcccctcctcccccctcctcctccccctcctccctcctccctcctccccctcctcctcctcccctcctccctcctcccctcctcccctcccctcctccccctcccccctcccttcctccccctcccccctcccctcctccccctctcctcctcccatccctcctcccatccctcctccccgttcccattctctcccctcccccttccatttctccctcctccccctgccctcctctcctcctcacctccccttctccgctcctttcttctcctccctccctttctctcctccctccccttctccccttctcctcttctccccttctcctctcttttcatccttcccttcttccctcctttcctcctcttttccctcttctcccccctcctcccctccttcctcctcccattccccctcctcccccctcccattccccctcctcccctccttcctcctcccattacccctcctctcctcccctcctcccacccccctctcctcccggctcctctcctcccctcctcatccccctcctctccttccctcctaacccccctcctctcctcccctcctcatccccctcctctccttccctcctcctatcccccctcctctcctcccctcctcctattccccctcctctcctcccctccttcctcctcctctcctcccatgccccctcctcccctcctcccatccccctcctcccctcctccctcctcccatcccatccccctcctctcctccccttctctcccctcctctcctcccctcctctcctctcctcctctcctcccctcctcccatcccccctcctcccatcccccctcctctcctccccactcctctcctccccactcctctcctcccctcatccccctcctctctcctcccctccccctcctctccttccctcctcctttcctcccctccccctccttccccctcctccccctccttctccccatcccccttccccttctcctcctctcccctcccccttctctttttccctcctcctcccttcctcctcccctcttctccccttttcccttttctcttcctctcctccccttctcccctcctgtcctccctccctttctctctttctttcctccctttccttctcccctgttctcctcccttcccttctccccttttcttccctcctcctttcctcccctcctccttttctctgtttctcttcctttcccctccactttccccttcctttcccctctcctttctccttcctttcctctccccttctcttccttttcctctctccccttcttttccctcttcccctcccctcctcttcccctcccctcctcttcccctcccctcctcttcccctcccctcctcttcccctctcctcctcttcccctcccctcctctttccctcccctcttctcctcccctcctctcccctcttcccctcccctcctcttccctccccttcccctcccctcctcttccctccccttcccctcccctcctcttccctccccttcccctcctcttccttcctctcttcccctcccctcctcttccctcccctcttcccctccccttctcttctcctccccttctcttcccctccccttttcttccctctccttgtcttccctgccctcctcttccctcccctcctcttccctcccctcttcccctctcctcctcttccctcccctcttcctctttcctcttcccctcccctcctcctccctcccctttcccctcttcccctcccctccgcttccctcccctttctcccccttctctcccctcccctctccccccttctctcccctcccctctcccccttctctcccctcccctctcccccttctctcccctctcctctcccccttctctcccccttctctcccccttctctctccccttctctcccccttctctcccctccccccttctctcccctcccctctcccccttctctcccctcccctctcccctgtcctctcctctccacccttctctcccctcccctctcctctcccccttccctctcctctcccccttctctcccctcccctctcctctccccccttttctccactcccctctcctctctcccctcctcctccgctctcatgtgaagaggtgccttgtgtggtcggtgggctgcatcacgtggtccccaggtggaggccctgggtcatgcagagccacagaaaatgcttagtgaggaggctgtgggggtccagtcaagtgggctctccagctgcagggctgggggtgggagccaggtgaggacccgtgtagagaggagggcgtgtgcaaggagtggggccaggagcggggctggacactgctggctccacacaggggcccagcagggagctcgtatgccgctcgtgcctgaagcagacgctgcacaagctggaggccatgatgctcatcctgcaggcagagaccaccgcgggcaccgtgacgcccaccgccatcggagacagcatcctcaacatcacaggtgccgcggcccgtgccccatgccacccgcccgccccgtgcggccctttcctctgcctccctcctccccccaaccgcgtcgcctttgccccatcccatcttcgtccccctcccctccccccaattcccatcctcatccccctcccccaattcccattctcctccccctcccccttccctattaccatcccttttctccatctctctccccttttctccatttccccccccgtcctccccgtccttttgtccattcccctcatcttcctcatccccctcatcccccttcccctcccttatcccccttcccctccctttccccctgctcctcttcttctcccttctcttttctctacccttttccttcctttttcctccctctccccatcatccccctcatcttcgtcctcatccccatcaccttccccctcccccctccaccactctctctccagcttcccccttccttctgcctgcacctcgctctctgccccctcaggttccccctttctcccagcccccaccctccggctccccctttttgcctgcccccaccctccctctacctccctgtctctgcactgacctcacgcatgtctgcaggagacctcatccacctggccagctcggacgtgcgggcaccacagccctcagagctgggagccgagtcaccatctcggatggtggcgtcccaggcctacaacctgacctctgccctcatgcgcatcctcatgcgctcccgcgtgctcaacgaggagcccctgacgctggcgggcgaggagatcgtggcccagggcaagcgctcggacccgcggagcctgctgtgctatggcggcgccccagggcctggctgccacttctccatccccgaggctttcagcggggccctggccaacctcagtgacgtggtgcagctcatctttctggtggactccaatccctttccctttggctatatcagcaactacaccgtctccaccaaggtggcctcgatggcattccagacacaggccggcgcccagatccccatcgagcggctggcctcagagcgcgccatcaccgtgaaggtgcccaacaactcggactgggctgcccggggccaccgcagctccgccaactccgccaactccgttgtggtccagccccaggcctccgtcggtgctgtggtcaccctggacagcagcaaccctgcggccgggctgcatctgcagctcaactatacgctgctggacggtgcgtgcagcgggtggggcacacgcggccccctggccttgttcttggggggaaggcgtttctcgtagggcttccatgggtgtctctggtgaaatttgctttctgtttcatgggctgctgggggcctggccagagaggagctgggggccacggagaagcaggtgccagctctggtgcagaggctcctatgctttcaggcccgtggcagagggtgggctcaggagggccatcgtgggtgtcccccgggtggttgagcttcccggcaggcgtgtgacctgcgcgttctgccccaggccactacctgtctgaggaacctgagccctacctggcagtctacctacactcggagccccggcccaatgagcacaactgctcggctagcaggaggatccgcccagagtcactccagggtgctgaccaccggccctacaccttcttcatttccccggggtgagctctgcgggccagcctggcagggcagggcagggcatcatgggtcagcattgcctgggttactggccccatggggacggcaggcagcgaggggactggaccgggtatgggctctgagactgcgacatccaacctggcggagcctgggctcacgtccgctaccccttccctgcccaggagcagagacccagcggggagttaccatctgaacctctccagccacttccgctggtcggcgctgcaggtgtccgtgggcctgtacacgtccctgtgccagtacttcagcgaggaggacatggtgtggcggacagaggggctgctgcccctggaggagacctcgccccgccaggccgtctgcctcacccgccacctcaccgccttcggcgccagcctcttcgtgcccccaagccatgtccgctttgtgtttcctgtgagtgaccctgtgctcctgggagcctctgcagagtcgaggagggcctgggtgggctcggctctatcctgagaaggcacagcttgcacgtgacctcctgggcccggcggctgtgtcctcacaggagccgacagcggatgtaaactacatcgtcatgctgacatgtgctgtgtgcctggtgacctacatggtcatggccgccatcctgcacaagctggaccagttggatgccagccggggccgcgccatccctttctgtgggcagcggggccgcttcaagtacgagatcctcgtcaagacaggctggggccggggctcaggtgaggggcgcagcggggtggcagggcctcccctgctctcactggctgtgctggttgcaccctctgggagtgagtctcgtcgcaggcgtcagaacaaggcagtttttgcagtgctgtgtgaagggctcgtgtgttcatcctgggaatgacctcgtgagcactcactgtccctgaggactaggacagctcctagctggaagtaggtgccagtcagtcagggtgggcagcccacgttctgcacagtagcgtggccccacaagtgacgtgagcatcgctaccactgtgggagactgtgcatccacccgcgatcctgactgcatagctcgtctctcagacggaggcgccagcaccctccccgtggctgtttcttcagtacctccattttcctttcattggaattgcccttctggcattccctttttgttttcgtttttctttttttagagacggagtctcactctgttgcccaggctggagtgcaatggcatgatcttggctcacagcaacttccagctcccgggtttaagccattccccttaagcgattctcctgagtagctgggagtacaggtgcacaccaccacacccagttaatttttcaccatgtcagccaggcgaactcctgacctcaggtgatccgcctgcctcggcctgccagagtgctgggatgacaggtgtgagccaccacacctggctgtgttcccattttttatctctgtgctgctttcctcttcattgcccagttctttcttttgattacctacttttaaaaactgtcggccgggcgcggtggctcacacctgtaatccgagcactttgggaggccaggcaggcaaatcacggggtcaggagatcgagaccatcctggctaacggtgaaaccctgtctctaataaaaagtacaaaaaaattagcccggcgtagtggcaggcgcctgtagtcccagctccttgggagactgaggcaggagaatggcgtgaacccgggaggcggagcttgcagtgagctgagattgcgccactgcactccagcctgggtgacacagcaagactccatctcaaaaaaaaaagaaaaaaaatactgtcacctgggtctgtcactgggagaggaggtgacacagcttcacgctttgcagtctgtgcatgaactgagggacgggtgtgtggtgcgggtcaccggttgtggcatgactgaggcgtggacaggtgtgcagtgcgggtcactggttgtggtgtggactgaggcgtgtgcagccatgtttgcatgtcacaagttacagttctttccatgtaacttaatcatgtccttgaggtcctgctgttaattggacaaattgcagtaaccgcagctccttgtgtatggcagagccgtgcaaagccgggactgcctgtgtggctccttgagtgcgcacaggccaaagctgagatgacttgcctgggatgccacacgtgttgggcagcagaccgagcctcccacccctccctcttgcctcccaggtaccacggcccacgtgggcatcatgctgtatggggtggacagccggagcggccaccggcacctggacggcgacagagccttccaccgcaacagcctggacatcttccggatcgccaccccgcacagcctgggtagcgtgtggaagatccgagtgtggcacgacaacaaaggtttgtgcggaccctgccaagctctgcccctctgcccccgcattggggcgccctgcgagcctgacctccctcctgcgcctctgcagggctcagccctgcctggttcctgcagcacgtcatcgtcagggacctgcagacggcacgcagcgccttcttcctggtcaatgactggctttcggtggagacggaggccaacgggggcctggtggagaaggaggtgctggccgcgagtaaggcctcgttccatggtcccactccgtgggaggttgggcagggtggtcctgccccgtggcctcctgcagtgcggccctccctgccttctaggcgacgcagcccttttgcgcttccggcgcctgctggtggctgagctgcagcgtggcttctttgacaagcacatctggctctccatatgggaccggccgcctcgtagccgtttcactcgcatccagagggccacctgctgcgttctcctcatctgcctcttcctgggcgccaacgccgtgtggtacggggctgttggcgactctgcctacaggtgggtgccgtaggggtcggggcagcctcttcctgcccagcccttcctgcccctcagcctcacctgtgtggcctcctctcctccacacagcacggggcatgtgtccaggctgagcccgctgagcgtcgacacagtcgctgttggcctggtgtccagcgtggttgtctatcccgtctacctggccatcctttttctcttccggatgtcccggagcaaggtgggctggggctggggacccgggagtactgggaatggagcctgggcctcggcaccatgcctagggccgccactttccagtgctgcagccagagggaaaggcgtccaccaaaggctgctcgggaagggtcaacacacttgagcagccttagctagactgaccagggagaaagagagaagactcagaagccagaatggtgaaagaacgagggcactttgctaagcagacgccacggacgactgcacagcagcacgccagataactcagaagaagcaagcacgcggctgtgcacgcttccgaaatgcactccagaagaaaatctcagtacatctataggaagtgaagaggctgagttagtcccttagaaacgtcccagtggccgggccgggtgtggtggctcacgcctgtaatcccaacacttcaggtggccgaggtgggcggatctgagtccaggagtttgagaccagcctgggcaacatagcaagaccccatctatataaaacattaaaaagggccaggcgcggtggctcacgcctgtaatcccagcactttgggaggccgaggcgggcagatcacttgaggtcaggagttcgagaccagcctggccaacacaatgaaaccccgactctactacaaatacaaaaacttagctgggcatggtggcgggcgcctgtagtcccagctactcgagaggctgaggcaggagaatggcatgaacccaggaggcggagcttgcagtgagccgagattgcgccactgcactccatcctgggcaacggagcaagactccatctccaaaaaaaaaaaaaaaaaatcccacaaagaaaagctcaggctcagagccttcacgatagaatttttctaagcagttaaggaagaattaacaccaatccttcacagactctttccaagaatacagcaggtgggaacgcttcccattcatacggaaacgggaggccgcaccccttaggaatgcacacgtggggtcctcaagaggttacatgcaaactaaccccagcagcacacagagaaggcgcataagccgcgaccaggaggggttgctcccgagtccgtggcaggaaccagaggccacatgtggctgctcgtatttaagttaattaaaatggaacgatggccgggtgtggtggctcacacctgtaatcccagcactttgggaggcggaggcgggcagatcacttgaggtcaggagttccaagaccagcctggccaacacagtgaaaccccgtctctactaaaaatacaaaaaattagctgggcatggtggcaggcacctgtaatcccagctactcaggaggctgagccaggacaatcgcctgaacgcgggaggtggaggttgcagtgagctgagattgcgccattgcactccagcctgggtgacagcgagactccatctaaaaaagaaaatatgaaatttaaaactctgttccttagctgcaccagtctgctgtcaagtgttcagtggcacacgtcgcgaggggctgccatcacggacggtgcagatgtcccatatatccagcattctaggacattctgtcagatggcaccgggctctgtcctgtctgctgaggaggtggcttctcatccctgtcctgagcaggtctgagctgccgcccgctgaccactgccctcgtcctgcaggtggctgggagcccgagccccacacctgccgggcagcaggtgctggacatcgacagctgcctggactcgtccgtgctggacagctccttcctcacgttctcaggcctccacgctgaggtgaggactctactgggggtcctgggctgggctgggggtcctgccgccttggcgcagcttggactcaagacactgtgcacctctcagcaggcctttgttggacagatgaagagtgacttgtttctggatgattctaagaggtgggttccctagagaaacctcgagccctggtgcaggtcactgtgtctggggtgccgggggtgtgcgggctgcgtgtccttgctgggtgtctgtggctccatgtggtcacaccacccgggagcaggtttgctcggaagcccagggtgtccgtgcgtgactggacgggggtgggctgtgtgtgtgacacatcccctggtaccttgctgacccgcgccacctgcagtctggtgtgctggccctccggcgagggaacgctcagttggccggacctgctcagtgacccgtccattgtgggtagcaatctgcggcagctggcacggggccaggcgggccatgggctgggcccagaggaggacggcttctccctggccagcccctactcgcctgccaaatccttctcagcatcaggtgagctggggtgagaggagggggctctgaagctcacccttgcagctgggcccaccctatgcctcctgtacctctagatgaagacctgatccagcaggtccttgccgagggggtcagcagcccagcccctacccaagacacccacatggaaacggacctgctcagcagcctgtgagtgtccggctctcgggggaggggggattgccagaggaggggccgggactcaggccaggcagccgtggttcccgcctggggtagggtggggtggggtgccagggcagggctgtggctgcaccacttcacttctctgaacctctgttgtctgtggaaagagcctcatgggatccccagggccccagaaccttccctctagggagggagcaggctcatggggctttgtaggagcagaaaggctcctgtgtgaggctggccggggccacgtttttatcttggtctcagagcagtgagaaattatgggcgggtttttaaataccccatttttggccgggcgcggtggctcacacgtgtaatcccagcactttgggaggccgaggtgggcagatgacctgaggtcagcagttcgagaccagcctggccaacatggcgaaaccccgtctctactaaaaatacaaaaaattagccgggcatgctggcaggcgcctgtagtcccagttactcgggagactgaggtaggagaatcgattgaacctggtaggtgaaggttgtagtgagccgagatcgcgccactgcactccagcctgggcaacaagagcgaaactccgtctcaaaaacaaaaaaattcctcaatttcttggttgttttgtaacttatcaacaaatggtcatatagaggttaccttgtatgtagtcacgcacatagtcacgcacatggcagccggcggcggagcgcacccacggcgtgttcccacgcgtgtgaccccgggctctgccatgccctcctatgctcaggtgtgctgaggtccacacggccctgccgttgcactgcagctgcctgcaggattcagtgcagtggcatgcagtgcaggtgcggtgccccggagccacaggccacaccacagggcctgcatgcacaggggctgcggtgtctgggtttgggtaactacgccctgtgacatttgcacagcaacagaattacctaatgacgcatttctcagaacacatccctggcactaagtggtgcgtgactgctgcttttgcatccacatctagtttgatttgtgtgttattcctttgagtgcttctcattgttaagcaaccaagaactaaagaggtatgaactgcccctggactcaaacaaaaaggaaaacttcctgatttacaaaaggcagataaccatcacatgagggcatctttatgaataaattgctggttggttttaaaaatacagagtatggggaaatccaggggtagtcactacatgctgaccagccccaggtatctccggcccaaagctctgtgaaatccagattcagtgcttccgcggggatttctgacggcagctcagactccgcatccacacagagcgcgtggccctcaccctcccggcttcctcaacccttggccgtcccttgctcggacagtgcttcgggctgaccaggtcggaggcttgggtttgtcctggacccctctgcgtccttcctcactgcagcctccagcgcgtcccgtggctcctttcccaacgcagagcacggccttccctgcgcctgagcctgcaccctccgtcctggcggcgcctctgccctggcattccctgccactccatgcctccctattggccattctccgtctctgccagcgagagcctgctccctgagtcagaccctgagtcatttgtgttgctataaaggaatagttgaggctgggttattttttatttttatttatttttttgagatggagtctctgttgcccagactggagtgcagtcgcatgatctcggctcactgcaaagtctgcctcccacgttcaagcagttatctgcctcagcctcccaagtagctaagattacaggcgcccgccgccacagccggctaattttttgtgtgtgtgttttagtagagaggaggtttcaccatcttagccaggctggtcttgaactcctgacctcgtgatccacccatctcagcctcccaaaatgctgagattacaggcgtgagccaccacgcctgaccaagttgaggctaggtcattttttaattttttgtaaagacagggtctcactgtctccaactcctgagctcaagtgatcctcctgcctcagcctcctgaagtgctgggattacaggcttgagacactgcgcccagccaagagtgtcttttatcctccgagagacagcaaaacaggaagcattcagtgcagtgtgaccctgggtcaggccgttctttcggtgatgggctgacgagggcgcaggtacgggagagcgtcctgagagcccgggactcggcgtctcgcagttggtctcgtcctccccctcaacgtgtcttcgctgcctctgtacctcttctctagcagctctgggaccgggcatatcagcatggtggcccgatgcagtggcacagcctcggtggtcactggctcctggagacacaagcagatctctggcctcagggagccctacacactgttgggatttgaaaggcattcatatgtttccttgtccagaagttaattttaggccataaacctgcatgggacagacacactggcgtctctagattgtagagatgcttgttggatggttgagacccaatcatagtttgcagggttgaaggggggctcattgcaccctgagagactgtgcactgctgtaagggcagctggtcaggctgtgggcgatgggtttatcagcagcaagcgggcgggagagggacgcaggcggacgcctgacttcggtgcctggagtggctcttggttccctggctcccagcaccactcccactctcgtttggggtagggtcttccggctttttgtcggggggaccctgtgacccaagaggctcaagaaactgcccgcccaggttaacatgggcttggctgcaactgcctcctggaggccgggatgaattcacagcctaccatgtccctcaggtccagcactcctggggagaagacagagacgctggcgctgcagaggctgggggagctggggccacccagcccaggcctgaactgggaacagccccaggcagcgaggctgtccaggacaggtgtgcttgcgtagccccgggatgcccctagcccctccctgtgagctgcctctcacaggtctgtctctgcttccccaggactggtggagggtctgcggaagcgcctgctgccggcctggtgtgcctccctggcccacgggctcagcctgctcctggtggctgtggctgtggctgtctcagggtgggtgggtgcgagcttccccccgggcgtgagtgttgcgtggctcctgtccagcagcgccagcttcctggcctcattcctcggctgggagccactgaaggtgagggggctgccaggggtaggctacaggcctccatcacgggggacccctctgaagccaccccctccccaggtcttgctggaagccctgtacttctcactggtggccaagcggctgcacccggatgaagatgacaccctggtagagagcccggctgtgacgcctgtgagcgcacgtgtgccccgcgtacggccaccccacggctttgcactcttcctggccaaggaagaagcccgcaaggtcaagaggctacatggcatgctgcgggtgagcctgggtgcggcctgtgcccctgccacctccgtctcttgtctcccacctcccacccatgcacgcaggacactcctgtccccctttcctcacctcagaaggcccttaggggttcaatgctctgcagcctttgcccggtctccctcctaccccacgccccccacttgctgccccagtccctgccagggcccagctccaatgcccactcctgcctggccctgaaggcccctaagcaccactgcagtggcctgtgtgtctgcccccaggtggggttccgggcagggtgtgtgctgccattaccctggccaggtagagtcttggggcgccccctgccagctcaccttcctgcagccacacctgccgcagccatggctccagccgttgccaaagccctgctgtcactgtgggctggggccaggctgaccacagggcccccccgtccaccagagcctcctggtgtacatgctttttctgctggtgaccctgctggccagctatggggatgcctcatgccatgggcacgcctaccgtctgcaaagcgccatcaagcaggagctgcacagccgggccttcctggccatcacgcggtacgggcatccggtgcactggtctgtcttctgggctttagttttgcctttagtccagccagaccctaggggacatgtggacatgtgtagatacctttgtggctgctagaactggaggtaggtgctgctggcatcagtaggcagaggggagggacacaggtccgtgtcttgcagtgcacaggacgggcccatgacagacaactgtctgccccagaacatccccaggataaggctgagaagcccaggtctagccgtggccagcagggcagtgggagccatgttccctgggtctctggtggccgctcactcgaggcgggcatggggcagtaggggctggagcgtgtgactgatgctgtggcaggtctgaggagctctggccatggatggcccacgtgctgctgccctacgtccacgggaaccagtccagcccagagctggggcccccacggctgcggcaggtgcggctgcaggaaggtgagctggcagggcgtgccccaagacttaaatcgttcctcttgttgagagagcagcctttagcggagctctggcatcagccctgctccctagctgtgtgacctttgccctcttaacaccgccgtttccttctctgtatatgagagatggtaacgttgtctaattgatggctgctgggagggttccctggggtggcgccgaaccagagctcaggcgagctggccagcaggaaacactcctgttgggttttgatgaggccctggccccggcctggggctctgtgtgtttcagcactctacccagaccctcccggccccagggtccacacgtgctcggccgcaggaggcttcagcaccagcgattacgacgttggctgggagagtcctcacaatggctcggggacgtgggcctattcagcgccggatctgctggggtgagcagagcgagggccccgggcgtctacgccaaggacaagggagtagttctccaggagtgccgcggcctcctgaccagcctggctccggggtgccggaagggctggggtgcggcacccacgccacccctctccggcagggcatggtcctggggctcctgtgccgtgtatgacagcgggggctacgtgcaggagctgggcctgagcctggaggagagccgcgaccggctgcgcttcctgcagctgcacaactggctggacaacaggtgggagctccctcccctgccctctccggggtggccgcagtcaccagccaggagcccaccctcactcctccggcccccgctggcctaggcggcttccacagcccctcagccacgcctgcactgcgcggtccccgcagctcccgccctgccacccgctcctactgacccgcaccctctgcgcaggagccgcgctgtgttcctggagctcacgcgctacagcccggccgtggggctgcacgccgccgtcacgctgcgcctcgagttcccggcggccggccgcgccctggccgccctcagcgtccgcccctttgcgctgcgccgcctcagcgcgggcctctcgctgcctctgctcacctcggtacgcccgtccccggccagaccccgcgcctcccaccggcagcgtcccgccccctcgcggggccccgcccggcagcgtctcacccctcgcagcgccccgccccctcgcagcgtcccgccccctcgcagggccccgccccggcagcgtcccgccccctcgtagggccccgccccggcagcgtcccgccccctcgcagggccccgccccggcagcgtccctcccgccctcctgaccgcgccccccacaggtgtgcctgctgctgttcgccgtgcacttcgccgtggccgaggcccgtacttggcacagggaagggcgctggcgcgtgctgcggctcggagcctgggcgcggtggctgctggtggcgctgacggcggccacggcactggtacgcctcgcccagctgggtgccgctgaccgccagtggacccgtttcgtgcgcggccgcccgcgccgcttcactagcttcgaccaggtggcgcagctgagctccgcagcccgtggcctggcggcctcgctgctcttcctgcttttggtcaaggtgagggctgggccggtgggcgcggggctgggcgcacaccccagggctgcaagcagacagatttctcgtccgcaggctgcccagcagctacgcttcgtgcgccagtggtccgtctttggcaagacattatgccgagctctgccagagctcctgggggtcaccttgggcctggtggtgctcggggtagcctacgcccagctggccatcctggtaggtgactgcgcggccggggagggcgtcttagctcagctcagctcagctgtacgccctcactggtgtcgccttccccgcagctcgtgtcttcctgtgtggactccctctggagcgtggcccaggccctgttggtgctgtgccctgggactgggctctctaccctgtgtcctgccgagtcctggcacctgtcacccctgctgtgtgtggggctctgggcactgcggctgtggggcgccctacggctgggggctgttattctccgctggcgctaccacgccttgcgtggagagctgtaccggccggcctgggagccccaggactacgagatggtggagttgttcctgcgcaggctgcgcctctggatgggcctcagcaaggtcaaggaggtgggtacggcccagtgggggggagagggacacgccctgggctctgcccagggtgcagccggactgactgagcccctgtgccgcccccagttccgccacaaagtccgctttgaagggatggagccgctgccctctcgctcctccaggggctccaaggtatccccggatgtgcccccacccagcgctggctccgatgcctcgcacccctccacctcctccagccagctggatgggctgagcgtgagcctgggccggctggggacaaggtgtgagcctgagccctcccgcctccaagccgtgttcgaggccctgctcacccagtttgaccgactcaaccaggccacagaggacgtctaccagctggagcagcagctgcacagcctgcaaggccgcaggagcagccgggcgcccgccggatcttcccgtggcccatccccgggcctgcggccagcactgcccagccgccttgcccgggccagtcggggtgtggacctggccactggccccagcaggacaccccttcgggccaagaacaaggtccaccccagcagcacttagtcctccttcctggcgggggtgggccgtggagtcggagtggacaccgctcagtattactttctgccgctgtcaaggccgagggccaggcagaatggctgcacgtaggttccccagagagcaggcaggggcatctgtctgtctgtgggcttcagcactttaaagaggctgtgtggccaaccaggacccagggtcccctccccagctcccttgggaaggacacagcagtattggacggtttctagcctctgagatgctaatttatttccccgagtcctcaggtacagcgggctgtgcccggccccaccccctgggcagatgtcccccactgctaaggctgctggcttcagggagggttagcctgcaccgccgccaccctgcccctaagttattacctctccagttcctaccgtactccctgcaccgtctcactgtgtgtctcgtgtcagtaatttatatggtgttaaaatgtgtatatttttgtatgtcactattttcactagggctgaggggcctgcgcccagagctggcctcccccaacacctgctgcgcttggtaggtgtggtggcgttatggcagcccggctgctgcttggatgcgagcttggccttgggccggtgctgggggcacagctgtctgccaggcactctcatcaccccagaggccttgtcatcctcccttgccccaggccaggtagcaagagagcagcgcccaggcctgctggcatcaggtctgggcaagtagcaggactaggcatgtcagaggaccccagggtggttagaggaaaagactcctcctgggggctggctcccagggtggaggaaggtgactgtgtgtgtgtgtgtgtgcgcgcgcgcacgcgcgagtgtgctgtatggcccaggcagcctcaaggccctcggagctggctgtgcctgcttctgtgtaccacttctgtgggcatggccgcttctagagcctcgacacccccccaacccccgcaccaagcagacaaagtcaataaaagagctgtctgactgcaatctgtgcctctatgtctgtgcactggggtcaggactttatttatttcactgacaggcaataccgtccaaggccagtgcaggagggagggccccggcctcacacaaactcggtgaagtcctccaccgaggagatgaggcgcttccgctggcccacctcatagccaggtgtgggctcggctggagtctgtgcaggggctttgctatgggacggagggtgcaccagaggtaggctggggttggagtaggcggcttcctcgcagatctgaaggcagaggcggcttgggcagtaagtctgggaggcgtggcaaccgctctgcccacacacccgccccacagcttgggcagccagcacaccccgctgagggagccccatattccctacccgctggcggagcgcttgatgtggcggagcgggcaatccacttggaggggtagatatcggtggggttggagcggctatgatgcacctgtgaggccatctggggacgtaggcagggggtgagctcactatcaggtggcacctgggcctgtcccaccagctcacgcctggacccacccccactcacatttgcgtgcagggccatctggcgggccacgaagggcaggttgcggtcagacacgatcttggccacgctgg

SEQ ID NO: 81 - DNA, 496 bp, Homo sapiens
tttttataataatttttgtaatttactttggatttataatatttctacataatgacatttggcaattttttgtttggttccccaatagtgaatccgaaactattaaagtggccaaaaatgatttcctaaggccctggaaaactcaggaatgcatccacttgcacttttcccatgcatggggaatcttcagagttttgcagccatgaagttaatatgtggtttcacaaggggaaacagtggcagaccacgcttgaattcggtcatgttctgaatcacttcaggttgtggcaaggctggtgcttgtgacaaatttatgtcattttgacatgggaactctccaacaacaggacaagaatccatttccctggcaagaacatggacggataccttatgtctccttggagcatctactgccaacatttccttgtagaatttgatgaaatcttccttggtaagtgtcttaaatatggcacctcagtgttatcctgtaaaatta

SEQ ID NO: 82 - DNA, 3262 bp, Homo sapiens
agggggcgaaggcggcggtggtgaggaagatactttggttagtgaccacatcgcagcatgttgagtcaagtttaccgctgtgggttccagcccttcaaccaacatcttctgccctgggtcaagtgtacaaccgtcttcagatctcattgtatccagccttcagtcatcagacatgttcgttcttggagcaacatcccgtttatcactgtacccctcagtcgtacacatggaaagtccttcgcccaccgcagtgagctgaagcatgccaagagaatcgtggtgaagctcggcagtgccgtggtgacccgaggggatgaatgtggcctggccctggggcgcttggcatctattgttgagcaggtatcagtgctgcagaatcagggcagagagatgatgctggtgaccagtggagccgtagcctttggcaaacaacgcttgcgccatgagatccttctgtctcagagcgtgcggcaggccctccactcggggcagaaccagctgaaagaaatggcaattccagtcttagaggcacgagcctgtgcagctgccggacagagtgggctgatggccttgtatgaggctatgtttacccagtacagcatctgtgctgcccagattttggtgaccaatttggatttccatgatgagcagaagcgccggaacctcaatggaacacttcatgaactccttagaatgaacattgtccccattgtcaacacaaatgatgctgttgtccccccagctgagcccaacagtgacctgcagggggtaaatgttattagtgttaaagataatgatagcctggctgcccgactggctgtggaaatgaaaactgatctcttgattgttctttcagatgtagaaggcctttttgacagccccccaggttcagatgatgcaaagcttattgatatattttatcccggagatcagcagtctgtgacatttggaaccaagtctagagtgggaatgggtggcatggaagccaaggtgaaagcagccctctgggctttgcaaggtggcacttctgttgttattgccaatggaacccacccaaaggtgtctgggcacgtcatcacagacattgtggaggggaagaaagttggtaccttcttttcagaagtaaagcctgcaggccctactgttgagcagcagggagaaatggcgcgatctggaggaaggatgttggccaccttggaacctgagcagagagcagaaattatccatcatctggctgatctgttgacggaccagcgtgatgagatcctgttagccaacaaaaaagacttggaggaggcagaggggagacttgcagctcctctgctgaaacgtttaagcctctccacatccaaattgaacagcctggccatcggtctgcgacagatcgcagcctcctcccaggacagcgtgggacgtgttttgcgccgcacccgaatcgccaaaaacttggaactggaacaagtgactgtcccaattggagttctgctggtgatctttgaatctcgtcctgactgtctaccccaggtggcagctttggctatcgcaagtggcaatggcttgttactcaaaggagggaaggaggctgcacacagcaaccggattctccacctcctgacccaggaggctctctcaatccatggagtcaaggaggccgtgcaactggtgaataccagagaagaagttgaagatctttgccgcctagacaaaatgatagatctgatcattccacgtggctcttcccagctggtcagagacatccagaaagctgctaaggggattccagtgatggggcacagcgaagggatctgtcacatgtatgtggattccgaggccagtgttgataaggtcaccaggctagtcagagactctaaatgtgaatatccagctgcctgtaatgctttggagactttgttaatccaccgggatctgctcaggacaccattatttgaccagatcattgatatgctgagagtggaacaggtaaaaattcatgcaggccccaaatttgcctcctatctgaccttcagcccctccgaagtgaagtcactccgaactgagtatggggacctggaattatgcattgaagtagtggacaacgttcaggatgccattgaccacatccacaagtatggcagctcccacacggatgtcatcgtcacagaggacgaaaacacagcggagttcttcctgcagcacgtagacagtgcctgtgtgttctggaatgccagcactcgcttttctgatggttaccgctttggactgggagctgaagtgggaatcagtacatcgagaatccacgcccggggaccagtaggacttgagggactgcttactactaagtggctgctgcgagggaaggaccacgtggtctcagatttctcagagcatggaagtttaaaatatcttcatgagaacctccctattcctcagagaaacaccaactgaaaagagccaggaaaacccgggaattttccaaaaggtcttcacgttaaacttgtcttatctcaggagagagcccgctcttgtctcccagttcctggtagggtctgcctgttggaaagtgtacctggatgcttctgggctccgtttggcaatagcaatcttggctgatgtgcacagtctggctcccagctcaccctttttttttaaagtaagaaaatagttgctaccgatagggactttgccaagtccaattatcttctaggattgaaaggtgcattttccccataaaaaaggcgaggaaaacccatggctgctttgtgtcacctcagtgacttacagtcccccttcgcatttagttggtactagagccagtcatccttaacaaatcttttcgcgttttatttctttcacatgtagtcatcttcaaaaaggaaagatttggaattttagaaaaggggcaactcttctttttagcattctcatcagaaagtcacaaaaatcgatggaatcatttccactgggaagattgaccttttgtatttatttgtggggtaaattaataagcattccagatgcttgcagcttcctgcatccaggagatgctgtgtcccccgtgatgcagctggaacccaagctgcagcaggagatgcaagtttcaggatgttccccactgagctggaggaatatctacagcagtgatgcttgaaatttttgtatgaattattttgtcgtcctacccttttcctccaaaacaaaaattagaggattattttaatactttggattcttcccccttttttgagaaataaagttttttatg

SEQ ID NO: 83 - DNA, 1022 bp, Homo sapiens
cacccccacctgccagagccttgatccctccctaggccctgcctaaccttgagttggccccaatccctcttggctgcagaagtccctttcacccccaatgagaggaggggcaggaccagatcttttgagagctgagggttgagggcattgagcaacacacagatttgtcgcctctgtccccgaagacacctgcaccctccatgcggagccaagatggggaatggaactgaggaagattataactttgtcttcaaggtggtgctgatcggcgaatcaggtgtggggaagaccaatctactctcccgattcacgcgcaatgagttcagccacgacagccgcaccaccatcggggttgagttctccacccgcactgtgatgttgggcaccgctgctgtcaaggctcagatctgggacacagctggcctggagcggtaccgagccatcacctcggcgtactatcgtggtgcagtgggggccctcctggtgtttgacctaaccaagcaccagacctatgctgtggtggagcgatggctgaaggagctctatgaccatgctgaagccacgatcgtcgtcatgctcgtgggtaacaaaagtgacctcagccaggcccgggaagtgcccactgaggaggcccgaatgttcgctgaaaacaatggactgctcttcctggagacctcagccctggactctaccaatgttgagctagcctttgagactgtcctgaaagaaatctttgcgaaggtgtccaagcagagacagaacagcatccggaccaatgccatcactctgggcagtgccaggctggacaggagcctggcctggggagaagagggcctgttgcatcagcctctgaccttggccagcaccacctgcccccactggctttttgtgccccttgtccccacttcagccccaggacctttccttgccctttggttccagatatcagactgttccctgttcacagcaccctcagggtcttaaggtcttcatgccctatcacaaatacctcttttatctgt

SEQ ID NO: 84 - DNA, 3413 bp, Homo sapiens
gtaactccaggacgagaccggagcgacccgcgcagcgagcataggcggcgaagctgcgcccggcgcccgagaccggcagctgcgtggggcgggggctgcgcccgagcccgatctgccggctccgagcagtggtctcggaaagagggtcgtggtcccgcacggatgcgcttgttgggagaaaccttggagattcacggcaaggcgtaaagcctggggcttccaacgatactctgggcagggatggaagcctagatgcctcaccgcaaggagcggccgagcgggtcctcgcttcacacacacggcagcaccggcaccgcggagggaggaaacatgtcccggctgtctctcacccggtcgcctgtgtctcccctggctgcccagggcatccccctgccagcccagctcaccaagtccaatgcacctgtgcacatcgatgtgggcagccacatgtacaccagcagcctggccacgctcaccaagtaccctgactccaggataagccgcctcttcaatggcactgaacccatcgtcctggacagtttgaagcaacattatttcattgaccgggatggggagattttccgctacgtcctgagcttcctgcggacgtccaagctgctgcttccggatgactttaaggacttcagtctgctgtacgaggaggcgcgctactatcagctccagcccatggtgcgcgagctggagcgctggcagcaggagcaggagcagcggcgccgcagccgggcctgtgactgcctggtggtgcgcgtcacgcccgacttgggcgagcggatcgcactcagcggcgagaaggccctcatcgaggaggtcttccccgagaccggagacgtcatgtgcaactccgtcaacgccggctggaaccaggaccccacgcacgtcatccgcttcccgctcaatggctactgccggctcaactcggtacaggatgttctataaaaatggcccagagtattttcaacaaagcgtgcttcatttgacacccagagtctgactttggattcgaactaaacccaggcaacaggcgaggcaggacagaggctgagtggaaaggtggtctggagccccttccctctccctgctgaccttggagtcgcaggcacccaccagctgccaagagaatccctggaccggctcttcctggatgggtccaagaattggacagctcagatggagtgagggcctattttccaacagctcttcgcagacccaagagcttggcacatttccgggttagggtggaatgggctttgcagggaagagggccccctgtgcacgcattccacagcctgtcggtcagaacttgctagttgcaggagacgggtgttacacgcagtcatcagacctcaccctcacagaggcacaaacccacatagttgtggacgcctgcagagactcaaatattgagaggacttctcctttttctctccctccagagctcccacgagctgatgcacccccaggcttcaaaccacctggaatgcacagctcagggaagctggtggatgcctagaggctgaaggacagggaactctccattattggggcaggactcagggaggacacttggggccatgtgtctggagagagggcataggttacaccctacagaataaagaagggacccaaagcctctttttgcctcccggaatcaaggccctgagggcagcaggatggtggcctgggtggggtcgtccaactaggtttgctaacctgaggggtcactgggcctggccacttctgtccctctggtggtggaacccagcacgtggttctgtagggacctttgtcagtgagcaagactgagatcgtcacaggagaaggtgcccttgctggctgccccagcaggcacccacctccctgccaggccaagccaggtgtcctcttgcagcttggccttgatgacctctgtttcttcctgggcaggtcctggagcggctgttccagaggggtttcagcgtggctgcgtcctgtgggggcggtgtggactcctcccagttcagcgagtatgtgctttgccgggaggagcggcggccgcagcccacccccactgctgttcgaatcaagcaggaacccctggactaggccctgcttcagtgcccacctgggcccccccagggacctggaaacagtgctggggagttctgcctgtgtatacttggccgtgggcatgagaccgagggtgaggctggagggtccaaagctggcccagcgagcaccagggtcccaggtgtcatggcaacagaacgtgggatgctggaggcatgcctgcagaaggactgttgatgcgacccaaagatacagcggtgggatctctgctgccagctctcccagcccctcagcttcgcagcctggcgcagcatcctctgaggccccggggcctgttggggcggggttggaagagccgtctgcagctacttcagaggagctgtttatccctctccacgcggggcagactctggcgggtctcctagcgtccgagagatggcttatttttctacagtatttaaaatggatgcagccctaactgcaaaagtcagagaggctgacaaggaccaatgcttctttatctggtgctcagttctcagtcagacgtgcagcatggctgcagggtggaccagctgcctggcattcaggcccagatgcctgcagggctggggctctcgggacagatgcagggatgtgtgctgcagggctgctgggaggagagtggtgggggcctgagggctgagtgattctgtaaccacctgagaccttcacgtttgctgccgttgggggctcaggctgcactccccgggtcacctgacctgctgcccaggggcttccagtcctgtctgtgtggactggcacctgggctgctggagaagtctcctcccgttcggaccagcctcagggctgcacgttacctcaggaatgggccccaccatgaaggggcccatctgtcagcagcgtcttctaggtccccagctcagggagccatccccagctccagttttctcatgcgaatatgcacagttttaattcacgttgttacactagcctgccgatgagacccagacacaggcagacctggcgctcttgacccctgattccagtgaggactggccctgaggagtccttgcagacctgctgcctgccccacgacaggcccaaagatggaccccccctggccttgtgacagctccccaagtgttctccggtggagaaactgcagaggactggtgggcggggctccccagccatcaccatcctgtgtacaatggctgtagacttgtatatggctcctttaatattgtaaagatgctgatgtacaattgtcgtgcatttgtgtgaacacattgcgttcccagtccatgccataaatgatgctctcaagcaaaaaaaaaaaaaaaaaa

SEQ ID NO: 85 - DNA, 1057 bp, Homo sapiens
gtctcagcggctgccaacagatcatgagccatcagctcctctggggccagctataggacaacagaactctcaccaaaggaccagacacagtgagcaccatgggacagtgtcggtcagccaacgcagaggatgctcaggaattcagtgatgtggagagggccattgagaccctcatcaagaactttcaccagtactccgtggagggtgggaaggagacgctgaccccttctgagctacgggacctggtcacccagcagctgccccatctcatgccgagcaactgtggcctggaagagaaaattgccaacctgggcagctgcaatgactctaaactggagttcaggagtttctgggagctgattggagaagcggccaagagtgtgaagctggagaggcctgtccgggggcactgagaactccctctggaattcttggggggtgttggggagagactgtgggcctggagataaaacttgtctcctctaccaccaccctgtaccctagcctgcacctgtcctcatctctgcaaagttcagcttccttccccaggtctctgtgcactctgtcttggatgctctggggagctcatgggtggaggagtctccaccagagggaggctcaggggactggttgggccagggatgaatatttgagggataaaaattgtgtaagagccaaagaattggtagtagggggagaacagagaggagctgggctatgggaaatgatttgaataatggagctgggaatatggctggatatctggtactaaaaaagggtctttaagaacctacttcctaatctcttccccaatccaaaccatagctgtctgtccagtgctctcttcctgcctccagctctgccccaggctcctcctagactctgtccctgggctagggcaggggaggagggagagcagggttgggggagaggctgaggagagtgtgacatgtggggagaggaccagctgggtgcttgggcattgacagaatgatggttgttttgtatcatttgattaataaaaaaaaatgaaaaaagtgaaaaaaaaaaaaaaaaa

SEQ ID NO: 86 - DNA, 2221 bp, Homo sapiens
agagcaaggaagggcaggggacctgggaaggaagttctggaaggcagtggggtttgagattggacccagggtcaagatagaacatgaaggtgggatgaggacatgaacagaacatggccaagaaggatctgggggagcagccaggacgaggcggagctgatccgagaggacatccagggggctctgcacaattaccgctcgggccgcggggagcgcagggcggcggcgctcagggccacgcaggaggagttgcagcgcgaccgctcgcccgccgctgagaccccgcccctgcagcgccgcccgtcagtccgcgcagtgatcagcaccgtagagcggggcgcgggccgcggacgaccccaggcgaagcccattcccgaggcagaggaggcgcagaggcctgagccggtggggacctcgagcaacgctgactcggcctccccggacctgggtccccggggtcctgacctggcggttctgcaggcggagcgggaagtggacatcctgaaccacgtgttcgacgacgtagagagctttgtatcgaggctgcagaagtcggcggaggcggccagggtgctggagcaccgggaacgcggccgcaggagccggcgccgggcggctggggagggcttgctgacgctgcgggccaagccgccctcggaggccgagtacaccgacgtgctgcagaagatcaagtacgccttcagcctgctggcccggctgcgcggcaacatcgccgacccctcctctccggagctgttgcacttccttttcgggcctctgcagatgattgtgaacacgtcgggggggccggagttcgcgagcagtgtgcggcggccgcatctgacatcggatgccgtggcgctgctgcgggacaacgtcactccacgtgaaaacgagctctggacctcgctgggggactcgtggacccgccccgggctggagctgtccccggaggagggacccccatacagacccgagttcttcagcggctgggagccgccggtcactgacccgcagagccgcgcctgggaggacccagttgagaaacagctacagcacgagcggaggcgccggcagcaaagcgccccccaggtcgctgtcaatggtcaccgagacttggagccagaatctgagcctcagctggagtcagagacagcaggaaaatgggtcctgtgtaattatgacttccaggcccgcaacagcagtgagctgtcggtcaagcagcgggacgtactggaggtcctggatgacagtcgtaagtggtggaaggttcgggacccagcggggcaggagggatatgtgccctacaacatcctgacaccctaccccggaccccggctgcaccacagccaaagccctgcccgcagcctgaacagcactcctcctccaccaccagccccagccccggccccacctccagctctggctcggccccgctgggacaggccccgctgggacagctgcgatagcctcaacggcttggaccccagcgagaaggagaaattctcccagatgctcatcgtcaacgaggaactgcaggcgcgcctggcccagggccgctcgggaccgagccgcgcagtcccagggccccgcgccccggaaccgcagctcagcccgggctcggacgcctccgaggtccgcgcctggctgcaggccaagggctttagctccgggaccgtggacgcgctgggtgtgctgaccggggcgcagcttttctcgctgcagagggaggagctgcgggcggtgagccccgaggagggggcacgtgtgtacagccaggtcaccgtgcagcgctcgctgctggaggacaaagagaaagtgtcagagctggaggcagtgatggagaagcaaaagaagaaggtggaaggcgaggtggaaatggaggtcatttgacctgccaggcgcccttcgcaaagagtgacgaggccccgtgggagaacggactcctcagactctccccaatagcggaagtcgatcttctgaaggatggccaatctgctccggccctggtcttcccccatcccggtggacagacttaacgatccttgctgcagtccctccggagaggatctggactggctgggagtggggagggcgtggagacagtctacggaaagcgctagcagacccccgagagggtgcagtggagccctgagcattgtaatatgcggcccagcctataaacagcctccgtgcttagcaaaaaaaaaaaaaaaaaaaa

SEQ ID NO: 87 - DNA, 2085 bp, Homo sapiens
ggctgcagttacagagtgctgccatcaccaagtatgtggcggacgtcctgccggggaagaatcaaagagcagagagcatggccagtgcagcgagggaactggttatccagcggttgagtctggtgaggagtctttgcgagagcgaggagcagcggttactggaacaggtgcatggcgaagaggagcgggcccaccagagcatcctgacacagcgggtgcactgggccgaggcgctgcagaaacttgacaccatccgcactggcctggtgggcatgcttactcacctggatgacctccagctgattcagaaggagcaagagattttcgagaggaccgaagaagcagagggcattttggatccccaggagtcggaaatgttaaactttaatgagaagtgcactcggagcccactactgacccaactctgggcaacggcggttcttgggtctctctcaggcacagaggacatacggatcgatgagaggacagtcagccccttcctgcaattgtcagatgatcgaaagaccctgaccttcagcaccaagaagtcaaaggcctgtgcagatggcccggagcgcttcgaccactggcccaatgccctggctgccacctccttccagaatgggctccatgcctggatggtgaatgtccagaacagttgtgcctataaggtgggcgtggcttcaggccacctgccccgcaagggttctggcagtgactgccgtctgggccacaatgccttctcctgggtcttctctcgctatgatcaggagtttcgtttctcacacaatgggcagcacgagcccctggggctgctgcggggcccagcccagctgggtgtagtgctggacttgcaggttcaggagctgctcttctatgagccagcctccggcatagtgctctgtgcccatcatgtgtccttcccggggcccctcttcccagtctttgctgtggccgatcagaccatttctatcgtccgctgacctctggccacaggaagccaggtccaccgcccaccaccctttcaggccatgtttctactcagtgtgcttttcccaaatgatgtgtgtggtgtttctaagagaaacagggcccataaccagtgggcagctttaggagggatggggatctgtttcagatctaggcataacctgtaaatcacaggtgtccaaacttttggcttccctgggccacatttgaagaagaattttcttgggccacataaaatacactaacgatagctgatgagctaaaaaaaaaaaaaaaagtctgtgtataatttttgtgatatctgccaccacagataagcaaaaaagtccttgcattcaaagggttggagattgctgctttgagtgctgggtacctgtggggaacctactactccctgggccttagtctcccaaatccaccatgcatctgcccctctgagggtgtcttcactttgtctctggcatctagcatggtgcctggtgcatagtgagcatgcaataaatatttggcaggtgagtggatggatagatggataggtgaatgtaggtggacaggtgactgggtggatgttgtggtctctggagaagcactgccattcagcctcctgctccagctgttcacatgcagaaatgctctcttcacaggcagagaagcctgtggctaaagtttccacatcccattaactcagtgcttttgtctttttcatgacatggcacatagagaaaatatttttttctagcacacaagagcaacctgaaaggctgctcctggctaggggactctgtcccgggggaccgtgtcctcccccatgtcctgcctaggccctcagaggaccaggggatcatgtctccaggtaacccgactgtagcccctgctggctgagctccagcctgtgcccactgataatagcagggacggcctttctcttagagcagctgataagtttccctacctgatggccccctctgacataaactgcacacctggggtgatggcttaaagccagaaagagctgagggagttaagagggccaaccttagggcacgtgggcattattaaaggtcttaaaagcattaaaaaaaaaaaaaaaaaaaa

SEQ ID NO: 88 - DNA, 2730 bp, Homo sapiens
agaatgcctatgagacacaggaagaaggcagcagacaagaatcttccctgccgtcctttagtatgtgcagtactggacctgatggtagagtttattgtaacacacatgatgaaggagtttcctatggatctctatatacgctgcatccaggtagtacacaaactgctctgctaccagaagaagtgtcgggtacgcctgcattacacctggcgggagctctggtcagccttgataaatttgctgaagttccttatgtcaaatgagactgtacttttggccaaacacaacatttttacattagcccttatgattgtgaacctatttaatatgtttatcacatatggcgacacatttctgccaacccccagcagctatgatgaactttactatgagattatccgcatgcaccagagctttgacaacctctactccatggtcctgaggctttctaccaatgcaggccagtggaaggaagcagctagcaaggtgacccatgcattggttaatatcagagccatcatcaaccactttaaccccaaaattgagtcctacgctgctgtgaatcacatatcccaactgtcagaggagcaggtgctggaggtggtgagagccaactatgacacgctcacgctgaagctgcaggatggcctggaccagtatgagcgctactcagagcagcacaaggaagctgccttcttcaaagagctggttcgatccattagcaccaacgtccggagaaacctggtcttccacacactcagccaagaagtcctgctcaaggagttctccactatctcctgaggccacgcctacctgagcagcctctgactgcccttacccatgaggatcatgggctggagggggagcgaggggagagggggctgcccccgaggttggagagaaacacagataccaagttctcttggtgaagaccgcacttcaatggagcttgggcagcaggggcaggagggtcaagccagggataatcttatttggggaggaatgggtgggcacagtggggagaggcctccaggaatgtggggacttccagagtgggctccctaaacagcccctcacatttccaatcttgaggttacaagctgtagctactgactaattttcgggagctggtgaggcaagcctcagggtaatgccagcaccctgaaagtcagtggctctgctcggcttctgaaaacagatcaactctcagatatagctggagctacatcctgcttcctttgggcctggggctgtgcttggcttgaaatctgtgtcccctgcctgcactggcactttgtccagtcatcgggacctttggctcagatttagggtaagataggaatagggtacctttttccttttttttctgagacggagtctcactctgtcgcccaggctggaatgcagtggcgtgatctcggctttactgcagcctccgcttcctgggttcaagcgattctcctgcctcagcctcccgagtagctgggactacaggagcgtgtgccacgcccggctaattttttgtatttttagtagagatggagtttcaccatgttacccaggatggtctcaatatcctgagttcatgatccacccaccttggcctcccaaagtgctgggattacaggcgtgagccaccacacccagccagttttcctattttctgaattcagaattgacttctctgggaaaactggagatgagaatctgcccagtgctctgctgtccagtcaccgccttttgaattttagttttggcaccaggagtaccgttagctttccccttcttctggcccatttgactcatcagcacaatagggtcaccaccttaacttttaatttctaatctgctttactgtctttagggtgtgtatgaaataaacattgacaggctttctggagccctcaaggtgcctactttgctggttccctttccagcagctcccccacctcccttagccccccctcctctggcagcctctcctgcctctgctgagctcccctccacgtgttccacccccttaccctgctgttgtttacatccaacctgcctgagaatttcctctggggaggaatctattcctgtcatggtctagtgcctgggagggagagaacttcctgggggtagggtgccctccatctgaaacaggccaggtgagcatcatgcataaggcctccattctgtccgctcagattctgggtggggccacaggcaaatctcctgacttatggggagttggcttgtggttcctcccttggatagcctccatggaaccactataggctttcccaacagctgcctctgaaatagctgctgcttcgagatcctccctttttaaagcactttctaaagccctcaggatggcgggagcaaacagcactggtatattctaggagtaagtgcaggaattcagcagtgagagcatgtctgggaccacctggactgccatccatttaacctcaaatctctttgggatactcgccctccctgggaaccagagttctggctctaacattgagcagctatgcactagttccagagaagccactaacaggctgccatgtgtagatgtaggttcttaagagatcacaggctgggtcatctgatcactggatggatagctcagcctggggcatttagtgttttccctggtgataaatccccaaggcagctggatttggagctggtggcaagttgaaattattaaaaattgatttgtgtgggactgtc

SEQ ID NO: 89 - DNA, 2079 bp, Homo sapiens
gagaggcagcagcttgttcagcggacaaggatgctgggcgtgagggaccaaggcctgccctgcactcgggcctcctccagccagtgctgaccagggacttctgacctgctggccagccaggacctgtgtggggaggccctcctgctgccttggggtgacaatctcagctccaggctacagggagaccgggaggatcacagagccagcatggtacaggatcctgacagtgatcaacctctgaacagcctcgatgtcaaacccctgcgcaaaccccgtatccccatggagaccttcagaaagtgtggggatccccatcatcatagcactactgagcctggcgagtatcatcattgtggttgtcctcatcaaggtgattctggataaatactacttcctctgcgggcagcctctccacttcatcccgaggaagcagctgtgtgacggagagctggactgtcccttgggggaggacgaggagcactgtgtcaagagcttccccgaagggcctgcagtggcagtccgcctctccaaggaccgatccacactgcaggtgctggactcggccacagggaactggttctctgcctgtttcgacaacttcacagaagctctcgctgagacagcctgtaggcagatgggctacagcagcaaacccactttcagagctgtggagattggcccagaccaggatctggatgttgttgaaatcacagaaaacagccaggagcttcgcatgcggaactcaagtgggccctgtctctcaggctccctggtctccctgcactgtcttgcctgtgggaagagcctgaagaccccccgtgtggtgggtggggaggaggcctctgtggattcttggccttggcaggtcagcatccagtacgacaaacagcacgtctgtggagggagcatcctggacccccactgggtcctcacggcagcccactgcttcaggaaacataccgatgtgttcaactggaaggtgcgggcaggctcagacaaactgggcagcttcccatccctggctgtggccaagatcatcatcattgaattcaaccccatgtaccccaaagacaatgacatcgccctcatgaagctgcagttcccactcactttctcaggcacagtcaggcccatctgtctgcccttctttgatgaggagctcactccagccaccccactctggatcattggatggggctttacgaagcagaatggagggaagatgtctgacatactgctgcaggcgtcagtccaggtcattgacagcacacggtgcaatgcagacgatgcgtaccagggggaagtcaccgagaagatgatgtgtgcaggcatcccggaagggggtgtggacacctgccagggtgacagtggtgggcccctgatgtaccaatctgaccagtggcatgtggtgggcatcgttagctggggctatggctgcgggggcccgagcaccccaggagtatacaccaaggtctcagcctatctcaactggatctacaatgtctggaaggctgagctgtaatgctgctgcccctttgcagtgctgggagccgcttccttcctgccctgcccacctggggatcccccaaagtcagacacagagcaagagtccccttgggtacacccctctgcccacagcctcagcatttcttggagcagcaaagggcctcaattcctgtaagagaccctcgcagcccagaggcgcccagaggaagtcagcagccctagctcggccacacttggtgctcccagcatcccagggagagacacagcccactgaacaaggtctcaggggtattgctaagccaagaaggaactttcccacactactgaatggaagcaggctgtcttgtaaaagcccagatcactgtgggctggagaggagaaggaaagggtctgcgccagccctgtccgtcttcacccatccccaagcctactagagcaagaaaccagttgtaatataaaatgcactgccctactgttggtatgactaccgttacctactgttgtcattgttattacagctatggccactattattaaagagctgtgtaacatcaaaaaaaaaaaaaaaaaaaa

SEQ ID NO: 90 - DNA, 2378 bp, Homo sapiens
aattccctccgccgcggtcgctgagcgagtgcggcgggaatgcggaaccggcgcgcgggctgaggccgcccgggatggcgcaggggcggcggcggcgggcggcctgcgcggggccctagcgagccgggctgacgctcccggccccggccccggcatcggcatcgcgggcgcatcgcggccatggccaaggagcggcgcagggcggtcctggagctgctgcagcggccggggaacgcgcgctgcgcggactgcggcgccccggatcccgactgggcctcctacactctgggcgtcttcatctgcctgagctgctcgggaatccaccggaatatcccccaggtcagcaaggtgaagtccgtccgcctggacgcctgggaggaggcccaagtggagttcatggcctcccacgggaacgacgccgcgagagccaggtttgagtccaaagtaccctccttctactaccggcccacgccctccgactgccagctccttcgagagcagtggatccgggccaagtacgagcgacaggagttcatctacccggagaagcaggagccctactcggcagggtaccgtgagggttttctctggaagcgtggccgggacaacgggcagtttttgagccggaagtttgtgctgacagaacgagagggtgctctgaagtatttcaacagaaatgatgccaaggagcccaaggccgtgatgaagatcgagcacctgaatgccaccttccagccggccaagatcggccacccccacggcctgcaggtcacctacctgaaggacaacagcacccgtaacatcttcatctaccatgaggacgggaaggagattgtggactggttcaatgcactccgagctgctcgcttccactacctgcaggtggcattcccaggggccagcgacgcagatctggtgccaaagctctccaggaactacctgaaggaaggctacatggagaagacggggcccaagcaaacggaaggcttccggaagcgctggttcaccatggatgaccgcaggctcatgtacttcaaagaccccctggacgccttcgcccgaggggaagtcttcattggcagcaaggagagtggctacacggtgctgcatgggttcccgccgtccacccagggccaccactggccacatggcatcaccatcgtcacgcccgaccgcaagtttctgtttgcctgcgagacggagtccgaccagagggagtgggtggcggccttccagaaggcggtggacaggcccatgctgccccaggagtacgcagtggaggcgcacttcaagcataaaccttagcgagtgcggctggaggaccacggacattggactcactgtggctggacggaggggacccgtggatgggggggctctggcgtcctgaggccacctggccccacctgctcctcagggcagcccggcgcggccaggtagggcccgagcttcagcttccaggatgcttctctggaacctcaaggcaggcagcccaggccctgggcctgatctctaaccccgtcatgctgctgctgaccacacccagccaacctgcccctccctgacccggggccccctttcctccagggcccagtctggctcccgagctcagacacagcccccaggagccgcccaccacggctgtgggaacttccaggcctcagcgcagagccctgcttggggccagcacggtgggcagctgccggccgctggggactgggccctgctcgcatgccgccccgccctccccccacctccacgactatttattgagcgcctgttgtgtgtcacggggctatgagggccgtggggtgtttgggtggattatccacacaggtcccggcccctgcccgggctggagttgccacagcctgtgctcctggtcctcacctggaggggccagcaggctgccgtcccaccacacgtggcctctgcgcccagcacggtgctcgccgacagtggtgtctgaacccttggggacgagggcctgggccgcggtgaggccaccagaggcaggagtggccctgggggtcccgggcactgtcgcgcttgctgcaggcggcccagccgtgtatttatttttcacctatctccttcctgtcaaggcaggccgggctccagggctccccttgcgtggggcatgtaggtgggggaggcgtctgcaggtcacctggggggcccagccctctcccagccttgcctggctgagctgtgttccaggggagccctggacaagccctcataggcagggagggggtttccgaggccaggcatccgccgccccgtgtcgcatcctggaataaaatgtggctctggcatggttaaaaaaaaaaaaaaaaaaaaaaaaaaaaaaaaaaaaaaaaaaaaaaaaaaaaaaa

SEQ ID NO: 91 - DNA, 4793 bp, Homo sapiens
attggatcaaacatgtcacaagagtcggacaataataaaagactagtggccttagtgcccatgcccagtgaccctccattcaatacccgaagagcctacaccagtgaggatgaagcctggaagtcatacttggagaatcccctgacagcagccaccaaggccatgatgatcattaatggtgatgaggacagtgctgctgccctcggcctgctctatgactactacaaggttcctcgagacaagaggctgctgtctgtaagcaaagcaagtgacagccaagaagaccaggagaaaagaaactgccttggcaccagtgaagcccagagtaatttgagtggaggagaaaaccgagtgcaagtcctaaagactgttccagtgaacctttccctaaatcaagatcacctggagaattccaagcgggaacagtacagcatcagcttccccgagagctctgccatcatcccggtgtcgggaatcacggtggtgaaagctgaagatttcacaccagttttcatggccccacctgtgcactatccccggggagatggggaagagcaacgagtggttatctttgaacagactcagtatgacgtgccctcgctggccacccacagcgcctatctcaaagacgaccagcgcagcactccggacagcacatacagcgagagcttcaaggacgcagccacagagaaatttcggagtgcttcagttggggctgaggagtacatgtatgatcagacatcaagtggcacatttcagtacaccctggaagccaccaaatctctccgtcagaagcagggggagggccccatgacctacctcaacaaaggacagttctatgccataacactcagcgagaccggagacaacaaatgcttccgacaccccatcagcaaagtcaggagtgtggtgatggtggtcttcagtgaagacaaaaacagagatgaacagctcaaatactggaaatactggcactctcggcagcatacggcgaagcagagggtccttgacattgccgattacaaggagagctttaatacgattggaaacattgaagagattgcatataatgctgtttcctttacctgggacgtgaatgaagaggcgaagattttcatcaccgtgaattgcttgagcacagatttctcctcccaaaaaggggtgaaaggacttcctttgatgattcagattgacacatacagttataacaatcgtagcaataaacccattcatagagcttattgccagatcaaggtcttctgtgacaaaggagcagaaagaaaaatccgagatgaagagcagaagcagaacaggaagaacgggaaaggccaggcctcccaaactcaatgcaacagctcctctgatgggaagttggctgccatacctttacagaagaagagtgacatcacctacttcaaaaccatgcctgatctccactcacagccagttctcttcatacctgatgttcactttgcaaacctgcagaggaccggacaggtgtattacaacacggatgatgaacgagaaggtggcagtgtccttgttaaacggatgttccggcccatggaagaggagtttggtccggtgccttcaaagcagatgaaagaagaagggacaaagcgagtgctcttgtacgtgaggaaggagactgacgatgtgttcgatgcattgatgttgaagtctcccacagtgatgggcctgatggaagcgatatctgagaaatatgggctgcccgtggagaagatagcaaagctttacaagaaaagcaaaaaaggcatcttggtgaacatggatgacaacatcatcgagcactactcgaacgaggacaccttcatcctcaacatggagagcatggtggagggcttcaaggtcacgctcatggaaatctagccctgggtttggcatccgctttggctggagctctcagtgcgttcctccctgagagagacagaagccccagccccagaacctggagacccatctcccccatctcacaactgctgttacaagaccgtgctggggagtggggcaagggacaggccccacagtcggtgtgcttggcccatccactggcacctaccacggagccgaagcctgagcccctcaggaaggtgccttaggcctgttggattcctatttattgcccaccttttcctggagcccaggtccaggcccgccaggactctgcaggtcactgctagctccagatgagaccgtccagcgttcccccttcaagagaaacactcatcccgaacagcctaaaaaattcccatcccttctttctcacccctccatatctatatctcccgagtggctggacaaaatgagctacgtctgggtgcagtagttataggtggggcaagaggtggatgcccactttctggtcagacacctttaggttgctctggggaaggctgtcttgctaaatacctccagggttcccagcaagtggccaccaggccttgtacaggaagacattcagtcaccgtgtaattagtaacacagaaagtctgcctgtctgcattgtacatagtgtttataatattgtaataatatattttacctgtggtatgtgggcatgtttactgccactggcctagaggagacacagacctggagaccgttttaatgggggtttttgcctctgtgcctgttcaagagacttgcagggctaggtagagggcctttgggatgttaaggtgactgcagctgatgccaagatggactctgcaatgggcatacctgggggctcgttccctgtccccagaggaagccccctctccttctccatgggcatgactctccttcgaggccaccacgtttatctcacaatgatgtgttttgcctgactttccctttgcgctgtctcgtgggaaaggtcattctgtctgagaccccagctccttctccagctttggctgcgggcatggcctgagctttctggagagcctctgcagggggtttgccatcagggccctgtggctgggtctgctgcagagctccttggctatcaggagaatcctggacactgtactgtgcctcccagtttacaaacacgcccttcatctcaagtggccctttaaaaggcctgctgccatgtgagagctgtgaacagctcagctctgagtcggcagactggggcttcctcctgggccaccagatggaaagggggtattgtttgcctcactcctggatgctgcgttttaaggaagtgagtgagaaagaatgtgccaagatacctggctcctgtgaaaccagcctcaggagggaaactgggagagagaagctgtggtctcctgctacatgccctgggagctggaagagaaaaacactcccctaaacaatcgcaaaatgatgaaccatcatgggccactgttctctttgaggggacaggtttaggggtttgcgttcgcccttgtgggctgaagcactagctttttggtagctagacacatcctgcacccaaaggttctctacaaaggcccagatttgtttgtaaagcactttgactcttacctggaggcccgctctctaagggcttcctgcgctcccacctcatctgtccctgagatgcagagcaggatggagggtctgcttctagctcagctgtttctccttgaggttgcggaggaattgaattgaatgggacagagggcaggtgctgtggccaagaagatctccgagcagcagtgacggggcaccttgctgtgtgtcctctgggcatgttaacccttctgtggggccaaaggtttgcatcgtggatccagctgtgctccagtctgtcccctcctcctccactctgactgccacgccccggaccagcagcttggggaccctccagggtactaatggggctctgttctgagatggacaaattcagtgttggaaatacatgttgtactatgcacttcccatgctcctagggttaggaatagtttcaaacatgattggcagacataacaacggcaaatactcggactggggcataggactccagagtaggaaaaagacaaaagatttggcagcctgacacaggcaacctacccctctctctccagcctctttatgaaactgtttgtttgccagtcctgccctaaggcagaagatgaattgaagatgctgtgcatgtttcctaagtccttgagcaatcatggtggtgacaattgccacaagggatatgaggccagtgccaccagagggtggtgccaagtgccacatcccttccgatccattcccctctgtatcctcggagcaccccagtttgcctttgatgtgtccgctgtgtatgttagctgaactttgatgagcaaaatttcctgagcgaaacactccaaagagataggaaaacttgccgcctcttcttttttgtcccttaatcaaactcaaataagcttaaaaaaaatccatggaagatcatggacatgtgaaatgagcatttttttcttttctttttttttttttttttttaacaaagtctgaactgaacagaacaagactttttcctcatacatctccaaattgtttaaacttactttatgagtgtttgtttagaagttcggaccaacagaaaaatgcagtcagatgtcatcttggaattggtttctaaaagagtaaggcatgtccctgcccagaaacttaggaagcatgaaataaatcaaatgtttattttccttcttatttaaaatcatgctaatgcaacagaaatagagggtttgtgccaaatgctatgaacggccctttcttaaagacaagcaagggagattgatatatgtacaatttgctctcatgttttt

SEQ ID NO: 92 - DNA, 1412 bp, Homo sapiens
ggctgcgcttccctggtcaggcacggcacgtctggccggccgccaggatgcaggccccgcacaaggagcacctgtacaagttgctggtgattggcgacctgggcgtggggaagaccagtatcatcaagcgctacgtgcaccagaacttctcctcgcactaccgggccacaatcggcgtggacttcgcgctcaaggtgctccactgggacccggagactgtggtgcgcctgcagctctgggatatcgcaggtcaagaaagatttggaaacatgacgagggtctattaccgagaagctatgggtgcatttattgtcttcgatgtcaccaggccagccacatttgaagcagtggcaaagtggaaaaatgatttggactccaagttaagtctccctaatggcaaaccggtttcagtggttttgttggccaacaaatgtgaccaggggaaggatgtgctcatgaacaatggcctcaagatggaccagttctgcaaggagcacggtttcgtaggatggtttgaaacatcagcaaaggaaaatataaacattgatgaagcctccagatgcctggtgaaacacatacttgcaaatgagtgtgacctaatggagtctattgagccggacgtcgtgaagccccatctcacatcaaccaaggttgccagctgctctggctgtgccaaatcctagtaggcacctttgctggtgtctggtaggaatgacctcattgttccacaaattgtgcctctatttttaccattttgggtaaacgtcaggatagatataccacatgtggcaagccaaagatctatgcctctgttttttcaatgagagagaaatagcaaatgttctttctatgctttcctcaccatcatcacagtgtttacaaacttttgaaaatatttagtctgttacaaacttctgtcatgtagctgaccaaaatcctgcagggccacagtcggcactgttatttgcttcttttaatcagcaaaggcctcaagtcttaaaataaaaggggagaagaacaaactagctgtcaagtcaaggactggctttcaccttgccctggtgtctttttccagatttcaatatattctctgatggcctgacaggcctattaagtagatgtgatattttcttccaagatgacctccattctcggcagacctaagagttgcctctgagttagctctttggaatcgtgaacacaggtgtgctatattgtccttgtcctaactgtcacttgccatggcctgaatgttggcttaactgaatattgtatgaaaagacatgcctccatatgtgcctttctgttagctctctttgactcaagctgtggggctcctctatacatgctatacatgtaatatatattatatatatttttgcaagtgaacaataaaacattaaaagataaaa

SEQ ID NO: 93 - DNA, 3279 bp, Homo sapiens
actgccggcctgcgcggtactcactgccggcctccgcggtacccactgccggcctccgcgctacccggccgcagcgcgcgagtcacatggaagctcctgaggagcccgcgccagtgcgcggaggcccggaggccacccttgaggtccgtgggtcgcgctgcttgcggctgtccgccttccgagaagagctgcgggcgctcttggtcctggctggccccgcgttcttggttcagctgatggtgttcctgatcagcttcataagctccgtgttctgtggccacctgggcaagctggagctggatgcagtcacgctggcaatcgcggttatcaatgtcactggtgtctcagtgggattcggcttatcttctgcctgtgacaccctcatctcccagacgtacgggagccagaacctgaagcacgtgggcgtgatcctgcagcggagtgcgctcgtcctgctcctctgctgcttcccctgctgggcgctctttctcaacacccagcacatcctgctgctcttcaggcaggacccagatgtgtccaggcttacccagacctatgtcacgatcttcattccagctcttcctgcaacctttctttatatgttacaagttaaatatttgctcaaccagggaattgtactgccccagatcgtaactggagttgcagccaaccttgtcaatgccctcgccaactatctgtttctccatcaactgcatcttggggtgataggctctgcactggcaaacttgatttcccagtacaccctggctctactcctctttctctacatcctcgggaaaaaactgcatcaagctacatggggaggctggtccctcgagtgcctgcaggactgggcctccttcctccgcctggccatccccagcatgctcatgctgtgcatggagtggtgggcctatgaggtcgggagcttcctcagtggcatcctcggcatggtggagctgggcgctcagtccatcgtgtatgaactggccatcattgtgtacatggtccctgcaggcttcagtgtggctgccagtgtccgggtaggaaacgctctgggtgctggagacatggagcaggcacggaagtcctctaccgtttccctgctgattacagtgctctttgctgtagccttcagtgtcctgctgttaagctgtaaggatcacgtggggtacatttttactaccgaccgagacatcattaatctggtggctcaggtggttccaatttatgctgtttcccacctctttgaagctcttgcttgcacgagtggtggtgttctgagggggagtggaaatcagaaggttggagccattgtgaataccattgggtactatgtggttggcctccccatcgggatcgcgctgatgtttgcaaccacacttggagtgatgggtctgtggtcagggatcatcatctgtacagtctttcaagctgtgtgttttctaggctttattattcagctaaattggaaaaaagcctgtcagcaggctcaggtacacgccaatttgaaagtaaacaacgtgcctcggagtgggaattctgctctccctcaggatccgcttcacccagggtgccctgaaaaccttgaaggaattttaacgaacgatgttggaaagacaggcgagcctcagtcagatcagcagatgcgccaagaagaacctttgccggaacatccacaggacggcgctaaattgtccaggaaacagctggtgctgcggcgagggcttctgctcctgggggtcttcttaatcttgctggtggggattttagtgagattctatgtcagaattcagtgacgtggtaggaaagaaagtcaggtcaagtgatgcttttgagcttacacacaattcacaggcccaccagtgacaatttactgtgagttaatgtcattcaggtgtgcccatggattttgagggctggaaatgcaaagacacatttttctataaaaagaaaaagcaactaaggttaaaagctatattgtggcccaagacactgtctgaaagatgacatgagtagtaattcaccactatctgaaccaagcaaggatcaatgtgctgactgcattggccaatggctttgatacttctgctatttttttagacacaaacccataaactaactgcttaagaattcatactgcttgaattatgtaaaatatattttacagtatatctttccttgggccttagattactattcactgggcaaatggtatttgtttttgttttaattttttttttaatagacggaagtcttgctctgtcatgcaggctggagtgcggtggtgcgatcatagctcactgcagcctcgaactcttgggcttcaagcaatcctcctgtgtcagccaccagagtagctgagactacaggggtatgccaccatgcccagctggcatttgttaatcttcatttgaggtctagatctaggcactgtggacactgaaaaacagttgggaaatctttcgagctgtggaaatccaaacaaagactgataattcctggtaggggtgtgtgcgtgacgtactgcagcctcaacctcctgggctcaagtgatcctcccacctcagcctcctgagtagctgagaccacaggcgtgtgccaccacgcctagctaattttttataccagggtctaccctttgtttcccaggctggtcttgaattcctgggatcaagcaatccttccaccttgccctcccaaagtgttgggattataggcatgagccaccacgactggccagaggacaaaattttaataaaggtcttagcttaagcagtaatcctacttcattaagccttcctggggtgcggtacacaccgttaattcagcaaccctcagtacatactaagtatgctcagtgctgtgaaagtggattacaccaaattaagtcattcttatcacacccaatcaaaagtcaagaagccagggataaaagcacctcaggcacataacattaatctagtaatgtaattctctgcacatccagctggtgaaactgcgtgctgtaagctgggaccagctttgtccataactgctgagagaacttgctgaagctctaggaataattttgcctgcccggttgctcaccagttgtagcttgccagctcccaacacccttcctggtgccaataaactttctcaaagagcaatactgacatttcttttgataaaacctccagccttctctgtgttgttccgacataccgaggaccaactggtctacatggatgccctgaacatgcaattctttcttccaaaataaaacattaaatagag

SEQ ID NO: 94 - DNA, 2399 bp, Homo sapiens
cccgggctcgcgggcagacggaggcgcctctctttccccgcccctcgcctcggccctttctcttcccagcacctcggctgttccccggcggcggcagcggcagcggcggcccacacagcagcgagaggcgagaggaggctgcctcgaggatgaagtgcaaacccaaccagacgcggacctacgaccccgaggggttcaagaagcgggcggcgtgcctgtgcttccggagcgaacgcgaggacgaggtcctgttagtgagtagcagccggtacccggaccgctggatcgtgccgggcgggggcatggagcccgaggaggagccgggcggtgcggcggtccgagaggtgtacgaagaagcgggagtcaaggggaagttaggccggctcctgggcgtcttcgaacagaaccaggatcgcaagcacagaacgtacgtgtatgtactgactgtcacggagctgctggaggattgggaagattcggttagcattgggaggaagcgagagtggttcaaagtcgaagatgccatcaaggttctccagtgccacaagcccgtgcacgccgaatatctggagaaactaaagctgggcggttccccaaccaatggaaactccatggccccatcctcgccagatagcgatccctaatgaacagcaaagatgttcagtattgtgctgaaagaaacattgatgtgaacccagtgatcagtggaattgtcaagtacaggtgagcacttctgtgttcccaagaagacagctcatctggtttcttcctgcatcttgggacactccttccctgtctataccactgactcttgctctggttgttgtactcttatacgtgaatagactcttaattcagcacctatagccttttgttgtgcttttttgatgtgtctgccttcattagactatgatgtctttgagagcaaagactatttttccttactctttgcatattctgcatctgagacactacttgaaatatggttggcatcactgaaggttctttgattcaattaatattttgtaatcaccgtgtggcaaaacattccccttccaatctggtgctagtagagtatatgctatctaggcaccatgtgtgtggcttttgtgtatcaggtgtttcagaaatatttcaagacagttgtaagatgtttgaggacaagaattattactcctatttctatgtcataccacacagtagctgcacagttttaagattatgccatcacctagggtaatgttttgtagaatcagtccttcgtgtaacaactctagtgtttttgtactgttgatgatttgcttaaattttattcaaaaactatcacttgctataaaggtaattgtaaaaataaatacagtggacgcaaaataatgttgtgagtttttataaaaataaattttaaaatgatatataagacatttttttgcaatgcctgccctaaccacttcttacatgtcatcttaacatctctttgaggaaacactgtttcctcattttacagatttaacatactgtattatttgatgccagagccaacaggctatatcataggcagtttccaaacttaattatgccatttagtttgtctagatttcttttgcctctctcactgatccatttggctgtagttttcatcccttttccagtacacacagctagctcctcatcctacctggtttctgcatatgagaatgcagagggctgagagagggcaaaattgttgtcatttagaaaaggcatttaggaaagaggctgctattagaggggaacacaaagtgaaggtttttttaaaaaagaggacttgcatcagctgcctccagaacaattttaagaaaataacaaagatgtttagaagaaatcttacggagtttgccatgggatgtgtgatatcagcagtcttcagctccttacaaattaccaaaagtggttctaatatgctagtttgtttgattttttcttttatattataaagcaattgcatcgataaaagcttggactccattttagtgtgacactcttcctcatgataccagtgaaatgtattgattgtgtccccagttgttacataatttgaaataaaaatataacttcttgatttattgttttttaagatgtgatatggtactgtggttatgttgttttaaaaaatgattatcttttagagaagtatactgaaaaatgtacaggtgaaatgatatgttactggtattcgcttcaaaatcatctgagtgtggggtaattgagtacatagatgaaacaagattggccataaattggtaattgctgaagctgtgtgatggatgtttgagagttcattatactattctctatacttttgtatatgtttgaaattttccataataaaaattgaaaaaagtaaaaaaaaaaaaaaaaaa

SEQ ID NO: 95 - DNA, 5490 bp, Homo sapiens
gtgggggccaggcagcacagatgaagcatttacctatctaggtaagtcaggaggagctcaaaaggagaagaaaacagtaggaggcaggggaagcagcctctgtctccatctctgccctttgaaacaaaagggtatttcttttctctcttcagcccccaacccagtggaggcccggcttgggacattgttcacttcccctcgcttcccctctagaagccccctttgccatccctgcaccttgtttcgggtgatgcccgagagggagctgtggccagcggggactggctcagaacccgtgacccgtgtcggcagctgtgacagcatgatgagcagcacctccacccgctctggatctagtgatagcagctacgacttcctgtccactgaagagaaggagtgtctgctcttcctggaggagaccattggctcactggacacggaggctgacagcggactgtccactgacgagtctgagccagccacaactcccagaggtttccgagcactgcccataacccaacccactccccggggaggtccagaggagaccatcactcagcaaggacgaacgccaaggacagtaactgagtccagctcatcccaccctcctgagccccagggcctaggcctcaggtctggctcctacagcctccctaggaatatccacattgccagaagccagaacttcaggaaaagcaccacccaggctagcagtcacaaccctggagaaccggggaggcttgcgccagagcctgagaaagaacaggtcagccagagcagccaacccaggcaggcacctgccagcccccaggaggctgcccttgacttggacgtggtgctcatccctccgccagaagctttccgggacacccagccagagcagtgtagggaagccagcctgcccgaggggccaggacagcagggccacacaccccagctccacacaccatccagctcccaggaaagagagcagactccttcagaagccatgtcccaaaaagccaaggaaacagtctcaaccaggtacacacaaccccagcctcctcctgcagggttgcctcagaatgcaagagctgaagatgctcccctctcatcaggggaggacccaaacagccgactagctcccctcacaacccctaagccccggaagctgccacctaatattgttctgaagagcagccgaagcagtttccacagtgacccccagcactggctgtcccgccacactgaggctgcccctggagattctggcctgatctcctgttcactgcaagagcagagaaaagcacgtaaagaagctctagagaagctggggctaccccaggatcaagatgagcctggactccacttaagtaagcccaccagctccatcagacccaaggagacacgggcccagcatctgtccccagctccaggtctggctcagcctgcagctccagcccaggcctcagcagctattcctgctgctgggaaggctctggctcaagctccggctccagctccaggtccagctcagggacctttgccaatgaagtctccagctccaggcaatgttgcagctagcaaatctatgccaattcctatccctaaggccccaagggcaaacagtgccctgactccaccgaagccagagtcagggctgactctccaggagagcaacacccctggcctgagacagatgaacttcaagtccaacactctggagcgctcaggcgtgggactgagcagctacctttcaactgagaaagatgccagccccaaaaccagcacttctctgggaaagggctccttcttggacaagatctcgcccagtgtcttacgtaattctcggccccgcccggcctccctgggcacggggaaagattttgcaggtatccaggtaggcaagctggctgacctggagcaggagcagagctccaagcgcctgtcctaccaaggacagagccgtgacaagcttcctcgccccccctgtgtcagtgtcaagatctccccaaagggtgtccccaatgaacacagaagggaggccctgaagaagctgggactgttgaaggagtagactctgcgaccagtacagaccctgtcctggctgaacaagaagagacacatgctccacttgggagcctttgccaccacgcaactcagggctcaagatgaatgggagggagagatttgagtccaagcatacatttatattcagtgttgtgccattgagttcccatgtggatcattctgaaggtgatctccacaagagggtgtgtgtgtgtgtgtttggtgtgtgtgtggagggggggccgctggatacatcactgaagctattgatataacacaatgagtcactgttcagaattttgctcttgttagatgttttcttacattgggtagagtccagcctagtgagagctgagtgaaggggctggccatgcctgagacaaaaagtcaaatgagacaatggacgtgtcaatgacttgaaaaaaagtcacatccagcaaatgcagggtcacatgaaatatgggcctcctggaatccctacagtggatggagactggctcataccttgccagatccctctctcagttccagccttctggacaaggcctgggctaagaggagctgattcgttatctcttcacccactgccctctcagtatcaccagtcccaaagacaggatacgtccctgtaacccaatctctcggttgattgatagcagaacagctcttgttggtctgagaaggcaggataagtgaccacatatttatgccactacctccaccagggagagtccttctccacaggcttgataaattcaatcaccaactgtgctgtcgtccctgactctgctactcccgttcttcctgctttcctgctccgtatctcagtctgcactgaccccagggctgggctgacatcaagatgggagcccagcccacgggctttataaacacccaagaaccgtttcagatcttctctgtgctgatgcaggtagttttaaatttttctcagttccagtgatagaaaacccacacaatacatcctctgccagtcttaatagaatatcagaggtaagaggggcctcagagaagctctgacgcagtgctgctggggaagggaagtgactaaccccgggtcagcctgccatttagggaaagagctgaggttcttacccttgttgcatgctgccacctctccttagccagtgctcttgtacatccacacagcaccctaaggagccatagtcaccatcaaagactcaaccctaaggcccttcaagatctcaaagtgccttctgaagcatcagagattaaatattgttcaaactaatagttattgctgtggcttttaattttatctttggaagatagctatatggtaactcatcattaaccagaacacctctcccctcaaattccgtgaccaagttgtgcagcttgagcaaatgccgaaagagggtattatgggtgggtggtgtgggcttgcaaatacaagcttggaggtgagacatggccagacatgactcctgcttccccttaggaagtaaatcttacttatggttgtgaactgcttggagtccaggatgcccagatgtgaggggcagatgaagggaatgttgctggaaaggtgccttttaaggctgctgagaatttctggactgtgtcctgatggacgcagcaccatcaaagcccagaatttctgaaaacggtgacaaggttaacataaggacaacaaatactccaccctgtcatggtatgtgaggtgtgggtgtggcggtttctgtgtacgtttgctcatacacgcacatccaaaagcctgtgcctcattcctggccatgggtgaggacttggtctgtcacggctgatgaggactcccacaaccggccaagttatgtcttattatacacccccagaaagagagaaagctgccttctggaggactgattccacatgctatattcagctgagttgatttctgtgtctatttcaacccataacctgaagaatgatcaccttattccttattcattaattttcttgattaatagggaaacttgggaatagctataaagtaaaacttgggtggaacctggggccctggcatcacacaagtgtgattaggatggtcaaggtcatcaggagtacagcctattatattcccacatcctgagaaaggtcatttctcccacacacgacaaagtcacagacatcctgcacctgccactaggcatcctcatcctactgacatgcccatttctccagttttcttaatctgagactcccttcccttgttttttaaagataccgtgcttctccacatcctcatccttcaaggagcatattttgctcttaggatggtctttgggattcaagaatagaataataaatccaaacttggtcattcccattttgaagagatgcaagagggcccagtgaggacatccgcctccctgaaagtggtgctagacagagctgaggtcattgtatctgtgtatccacataggatttctcttaattcagcttgaattgatggggagggaggtaagagtagggtcagagttactcatcccttttcaaagaattgtgggtggaagtttgtaaaggccattcatttgattttcaaaatcaaagcgacagctctacttccacttggccttagatctctgctataccctgccatagccttgatgccactgggcacaagccacctgccaaatacaggagtggcctctcccagcctggcatgataggggggtctgtgccctcagatgtgttgacagctgctcttctgaattgccacacctgtgctacacttggaattctgtgctctgactctgcagggtaggaccacgtgccatctcacacagaggtcaaccgatgagcccactcactcgtacatgccttcttccacagtgggaagcatgatctggcaggggccgccctgtaggctggggatgggctgctgtgtgaatgttgacgttcgtttcatggagaaaggggaggtgaaagattgaagagcaggttcctgtcaatgttctgagttcgagctggaggtgtagattgaatagtctacatggtctgtgagtgtgtgagatgaacccttccatcctttgacacctggttgtatgtgtaggctaagaaggaaggaccctcctgtcagtgtgcaaagctgtaatctcatggactagaggagagggggccaaggggatggacaggagaagtcatgcagaatctaagcaggaatgcagatagaacacatctaggctcttttccccaggagagtgatgatggagcatatagatctggctcaaattcagcctccatcacttaccagtcaggaaccctggcgatatcactttaactttctgaacctcagagtcttcacctataagacggggaaaataataccaccctttcaagattgttgagataaataagtgatataaaacatgtaaagcttagttctggccacagtgtagctactcaataaatgataatact

SEQ ID NO: 96 - DNA, 4320 bp, Homo sapiens
acagatcaacagtacaaattctgaagtttgtaaacttgctgatggtggtggtaagccatggcagatgataaagttgctatcttaacggatgatgaagaggaacagaagagaaagtatgtgcttgcagatccctttaatggtatttccagggaaccagaaccaccttcgaatgaaacaccttcctccacagaaacatctgctattcctgaggaggaaatagactggatagagaaacattgtgttaagataaacaacgatcttctaatttccaaggtcttttattttttcttttactctgcctatggctctctctatccccttttgcctgtgtattacaaacagctgggaatgtctccaagccagagtggactactagtaggtattcgttacttcattgaattctgcagtgcccccttttggggtgtagttgcagaccgctttaaaaaaggcaaaattgtcctcctcttttctcttttgtgttgggttttattcaacctgggcattggatttgtcaaacctgctaccttgagatgtgtaccaaagattcgcccaacaactcaccccaccaatgcaagtcaccagttaactatcctgccaacaaattcttcctttacctctttcctcaccatatcaccaaaaatgcgtgagaaaagaaaccttttggaaacagggctcaatgtctcagacaccgttactttgccaacagctccaaacatgaacagtgaacccactctgcagccccagacaggtgaaattactaaccgtatgatggacttgactttgaactcaagcacagcaacccctgtctccccaggaagcgtaaccaaggagacaaccactgttattgttaccaccaccaaatctttaccttctgaccaagtcatgcttgtttatgatcaacaagaagttgaagctatattcttggtgatcttggtagttgtcataataggagaatttttcagtgcctcttctgtcacaatcgtagacacggtcacactccagtatctgggaaaacacagagatcgctatgggttgcagcgcatgtggggctccctgggctggggcctggcgatgctgtctgtgggcatcgggatcgactacacccacatcgaagtgctcatcgatggaaaggggtgtaagccccccgagtacaggaattaccagatcgtcttcatcgtcttcggcgttctcatgaccatggccttgatcgttgccactcagttccggttccgctacaaccatttcaaaaacgatgattctaaagggaaagaggtggagatcccgcaggtggaaaggaacaactctacagagtcctctgaggagacaccaaccaccacaagccactcgcaggccttcaacttttgggacttaatcaagctgctctgcagcgtgcagtatggctcagtgctgtttgtggcttggttcatgggttttggatatggcttcgtgttcacctttctctactggcatttggaagacctcaatggaactacaaccctctttggggtctgttcagtcctgagtcatgtgtctgagctgacagcatatttttttagtcacaagcttattgaattgatcggccacatcagggttctgtacattggcctggcctgcaatacggctcgctatatttatatttcctacctggagaatgcctggactgttctccccatggaagttcttcaaggagtgacacacgcggccatctgggcagcatgcatttcttacctcagtgcagccgttccccctgagctgaggacatctgctcagggcatcctgcagggccttcacctgggtttgggaagaggatgtggtgccatgatcggaggcgtgttagtcaattattttggggctgctgcaaccttccgaggaattggcatggcctgcttggtgatcctactgctctttgccctgatccagtggctggcagtgccagatgaggaagaagacaagacaatgttggcagaaagaattcctgttccctccagtcccgttcctatagcaaccatcgacttggtacagcaacagacagaagatgtcatgccacgcattgagcccagacttccacccaagaaaactaagcaccaggaagaacaggaagatgtgaacaaaccagcctggggagtcagctcttctccctgggtgacctttgtctatgcactctaccaaattaaagagatgatgcaactcacaagagacaaccgtgcttctgagatacagcctttacaggggaccaatgagaatagggaaaattctcctgctggtagagcccagcctgtcccatgtgagactcactctgacccatctagaaaccagccatcccctgacgcagcagcatctcagacgcagaccagccccgctcaccccagtgtggacccgtgcacagaggagagtgaagagcagcaggctcagctggccgcgggaggacactgagggcatcctgctcatctcacaccctgcatggaatcaggctcctcagccaggacacagggtgaggccccccagccaggatatgcctcccctggaggagcacagcactgcatatgcttctaaatatctaaactcattaacatggaaacacacacacaggagctacagtacatattggcaggaaaaggtaaactttcgtaatctcattggaattacaacagggaaatggagttcaatgaggactttcagttctttgcttggttaggttaaggatgatagaatttctctgccagtgcagtaagagttgaaaccggcagttacactaagtaagtggagggaatgaaagtgtttcgaggtgaatgtggatataatttccctcttctgattatttattcttatttggttcctaacacaaactgggaagagatagaattcatctatactttcttttttcttggagagaaccgtttaaaaaattacaagatatatttaaaaagtaaccagataaaagtagcacatgtgcttttgttaaaaataaagttaaaagttaaagttaaaaaatgaagttaaaagtttcatcagaaactttacatatctttagcaaatatatttttatatgtgtatggcatataatggaaataattctttgagcaacagaagctattattaactactgcaagctaagccgagcttaaaaatgccttttgttttaaatgggctttgagaaaaaaaacagaaacaagcgattatttcaaatcaaccaaccaactcagtatcctgtgttttgatagacaagagtttactaaatatattgatactgtaaatagcctctctcgctatttactatcttatagtaattcaggctctaattagctgagggaatgaaacacacaaaaatcactgaattcctaagagttccttaaataagcagtactagttacaaatcacagtataagatttaagtgcctgggggaaggatacaatttttagaaattacatattgggtcagttttgttttgtttttggtgaggaaaaggtggtaaataggaaaccatgaatgggaaggatggcaataagtagcaactatactttccaatgactaaagaaagaaaatctcagtatattcgttctcatgaagacacagtcagacactggacaatgtaatgtatgcaactgcaaacgttacaactgcagccagaacaatggctgggtggatcgcacgtaaagcttgccactaaaaatcaaagcagaggttaacaggaaacctggggggagtgtggaaaagggaaaactgttttagctgaataaaggtgaattatataatttataatagctgtggatgagcacaggagagagaggaaagaaaagaacagtcgaaatgagcaactcaccttaccctctgaccctgattagacaggatcaattgtaaagtgagggcttctccatgacaccatagttctgcccaatactgcatttgggataagaaattctacacttggatgtctcgcttcacaataaaacacagcttaaaaataaaataactgaaagaaatagaattcagcaaatagttattttttgcacttgaactgaaacgtactgtactgtaaattatgactcattttaagtgacctttaaaatcagatgtatttattatgcttgtgtaattatagaaataaagaaatgggtgacaggcttaacctcacctatgaatgtacagtatgtggatttgtgaaactgactgtaggaagtcaaaaacttgtactgtatcttgtgtttacagttctgatttattcctttgaaaagcctgctgttttggaaatgcacagttgacatgttgaaataaaaatgaataccatttttaaaaaaaaaaaaaaaaaaaaaaaaaaaaaa

SEQ ID NO: 97 - DNA, 1498 bp, Homo sapiens
ttacattagcaagagagcaagttgttccagtagttgcctggcaggagaatttgaaagggtgccccaaaggacaatctctaaaggggtaagggagatacctaccttgtctggtaggggagatgtttcgttttcatgctttaccagaaaatccacttccctgctgaccttagtttcaaagcttattcttaattagagacaagaaacctgtttcaacttgaagacaccgtatgaggtgaatggacagccagccaccacaatgaaagaaatcaaaccaggaataacctatgctgaacccacgcctcaatcgtccccaagtgtttcctgacacgcatctttgcttacagtgcatcacaactgaagaatggggttcaacttgacgcttgcaaaattaccaaataacgagctgcacggccaagagagtcacaattcaggcaacaggagcgacgggccaggaaagaacaccacccttcacaatgaatttgacacaattgtcttgccggtgctttatctcattatatttgtggcaagcatcttgctgaatggtttagcagtgtggatcttcttccacattaggaataaaaccagcttcatattctatctcaaaaacatagtggttgcagacctcataatgacgctgacatttccatttcgaatagtccatgatgcaggatttggaccttggtacttcaagtttattctctgcagatacacttcagttttgttttatgcaaacatgtatacttccatcgtgttccttgggctgataagcattgatcgctatctgaaggtggtcaagccatttggggactctcggatgtacaacataaccttcacgaaggttttatctgtttgtgtttgggtgatcatggctgttttgtctttgccaaacatcatcctgacaaatggtcagccaacagaggacaatatccatgactgctcaaaacttaaaagtcctttgggggtcaaatggcatacggcagtcacctatgtgaacagctgcttgtttgtggccgtgctggtgattctgatcggatgttacatagccatatccaggtacatccacaaatccagcaggcaattcataagtcagtcaagccgaaagcgaaaacataaccagagcatcagggttgttgtggctgtgttttttacctgctttctaccatatcacttgtgcagaattccttttacttttagtcacttagacaggcttttagatgaatctgcacaaaaaatcctatattactgcaaagaaattacacttttcttgtctgcgtgtaatgtttgcctggatccaataatttactttttcatgtgtaggtcattttcaagaaggctgttcaaaaaatcaaatatcagaaccaggagtgaaagcatcagatcactgcaaagtgtgagaagatcggaagttcgcatatattatgattatactgatgtgtaggccttttattgtttgttggaatcgatatgtacaaagtgtaaataaatgtttcttttcatt

SEQ ID NO: 98 - DNA, 2045 bp, Homo sapiens
gagattctgtgccccttgtcgggccgcttgtttggctgctgccgtcacctcatggcgacgcgggtagaggaggcagcgcggggaagaggcggcggcgccgaagaggcgactgaggccggacggggcggacggcgacgcagcccgcggcagaagtttgaaattggcacaatggaagaagctggaatttgtgggctaggggtgaaagcagatatgttgtgtaactctcaatcaaatgatattcttcaacatcaaggctcaaattgtggtggcacaagtaacaagcattcattggaagaggatgaaggcagtgactttataacagagaacaggaatttggtgagcccagcatactgcacgcaagaatcaagagaggaaatccctgggggagaagctcgaacagatccccctgatggtcagcaagattcagagtgcaacaggaacaaagaaaaaactttaggaaaagaagttttattactgatgcaagccctaaacaccctttcaaccccagaggagaagctggcagctctctgtaagaaatatgctgatcttctggaggagagcaggagtgttcagaagcaaatgaagatcctgcagaagaagcaagcccagattgtgaaagagaaagttcacttgcagagtgaacatagcaaggctatcttggcaagaagcaagctagaatctctttgcagagaacttcagcgtcacaataagacgttaaaggaggaaaatatgcagcaggcacgagaggaagaagaacgacgtaaagaagcaactgcacatttccagattaccttagatgaaattcaagcccagctggagcagcatgacatccacaacgccaaactccgacaggaaaacattgagctgggggagaagctaaagaagctcatcgaacagtacgcactgagggaagagcacattgataaggtgttcaaacgtaaggaactgcaacagcagctcgtggatgccaaactgcagcaaacgacacaactgataaaagaagctgatgaaaaacatcagagagagagagagtttttattaaaagaagcgacagaatcgaggcacaaatacgaacaaatgaaacagcaggaagtacaactaaaacagcagctttctctttatatggataagtttgaagaattccagactaccatggcaaaaagcaatgaactgtttacaaccttcagacaggaaatggaaaagatgacaaagaaaattaaaaaactggaaaaagaaacaataatttggcgtaccaaatgggaaaacaataataaagcacttctgcaaatggctgaagagaaaacagtccgtgataaagagtacaaggcccttcaaataaaactggaacggttagagaagctgtgcagggctcttcaaacagaaaggaatgagctcaatgagaaggtggaagtcctgaaagagcaggtatccatcaaagcggccatcaaagcggcgaacagggatttagcaacacctgtgatgcagccctgtactgccctggattctcacaaggagctgaacacttcctcgaaaagagccctgggagcgcacctggaggctgagcccaagagtcagagaagcgctgtgcaaaagcccccgtccacaggctctgctccggccatcgagtcggttgactaagatgaggtgtgatcactgtattgagagatatattttgtgtataactttctctgttagtagttaactattggttttgtggtgaaaattttcttactttttctaccatatctgtattttcttagaactactggacttatgtggtacaggaggctgcttagcagttttgaatagtttaatctataaattttcctcagctgtgttgcacatcagcctcgttctccctccactggaatgcatgtgttcactgccttgtcctttctctccctgctccttgcacattatcatcctaatgaaaatttcactgacagggccgaccattacaagggaactttgttctgacgatggttccttgatgtgaaaacaatattaatttaaacgtcttagcccccccccccataatattattc

SEQ ID NO: 99 - DNA, 1796 bp, Homo sapiens
ctgggctcgggtgatcctcctgtcttagccttccaaggtgctgggattacaggtgtgggccaccatgcccagccaccatcttggtttaatttctttccttggaaatggagcaaagggctttcactcttctttttcatggctgcatagtattccataattgtttaaacaattgataatagacactgtatcggggtgactggtatacccccaaaatcacatctgcccagagcctcaggacatggccttgtttggaaatggttttagcagatgcagctaagatgaggtcaccccgtgttaggatggccccgaatccagtgcctggcacccttataaggagagggaaacttggacgcagacaggaaggccgggtgaagacagaagcagagaccgggggccaaggagtgcctggggttgcccagagccaccacgggctgcaagaggtgtgggacagactctctcagccacagaagggcccagccccgcacaggcctggatttcagagggcgaacatttctgtggccgaagctcccagtgcgtttgcagtccttggagacggccgcagacacatttgttcttggcctgtctccaggtctgtagcccccacagtgagcggccactggccggaggggaacaggaagagctggaggggacgtcacacacatgagccttttaggaataacgagtgacacgtgcaagaccccaaaccaaacaccatgtaacctgacacccagggagggagggagggaggggctgggaggggctcacctgtagggaggggctcacctgtacagcggtgctgggaagctggcctcgagggtccccgaggggatacagggccgtgcagcctcttgcctgagggtttgcatgtctgcctggatcccccgggctcctgccagaaggcctctgaggccaccgttgacagcataaaggccacccagtgtctcggcaaccacgctgaccactccctcctcccagctgcggggtgaggtggcctcgagggaagggctggagagtcgttctgagtatttaacaactgggggtgacacagtgtgggtgggcaaggccagggccactgccaggtggggtccgtggccctgagcccccagctctatgcaccccccacctggggtctggcttctccatctccacacccccttgaggggcttctgtctccccctgccccttcgatcgcaggaggcagtgcctggccggggtcgcaggcacctgtcaccccagctcctcactcctcacccactcacatccagtccgtttgtaaaatacacccaggatgagacctgcacgcaagtggctcacagcagcacgatttgtgacagcccgaggcggagaacaccgaacacccagtgaaggtgaggggatcagcacggcgcggccacccacgcacccacgcgctggaatgagactcagccacaaggaggtgcgaagctctgacccaggccacagtgcggatgcaccttgaggatgtcacgctcagtgagagacaccagacacagaagggtacgctgtgatcccacttctatgaaatgtccaggacagaccaatccacagaatcagggagaggattcgtgggtgccgggactggggagggggacctgggggtgactaggtgacataatggggacagggctgccttctgggtgatgagaatgttctggaatcagatgggatggctgcacggcgtggtgaaggtactgaacgccacctcactgtaagacggtagattttgtattttaccacaataaacaaaacaaaacaaaaccaaaaaaaaaaaaaaaaaa

SEQ ID NO: 100 - DNA, 2943 bp, Homo sapiens
gtgctgcctggcgctggctaggaggcaaacgcacgcgggaagagctgctacccattccagggaccctgccgctgcccctctgaggggtctgcacctcctgggagcaggtgggtctctgggacgagggtccatggtggatggctctggagacgctcccgaggctgtgccgtcccgctgctgcacaggtcggagggtcaccgcagaggctactcgggctggggctggggccgagggagcccgcactggagccccatgtggaacccaaggatgcagctgctctgctaacacggcagcccatccttcgagactgtgacctcgccacagtggccctcagccctccacctccggcgggggcgagggccacccacctccaagtctccagccatgacgacctccgcactccggcgccaggtgaagaacatcgtgcacaactactccgaggcagaaatcaaggtgcgcgaggccaccagcaatgacccctggggcccccctagttcgctcatgtccgagatcgctgacctgaccttcaacacagtggccttcaccgaagtcatgggcatgctgtggcggcggctcaatgacagcggcaagaactggcggcacgtgtacaaggctctaacattgctggactacctgctcaagacgggctccgagcgggtggcccaccagtgccgcgagaacctctacaccatccagacactcaaggacttccagtacatcgaccgcgacggcaaggaccagggcgtcaacgtgcgcgagaaggtcaagcaggtgatggccctgctcaaggatgaggagcggctgcggcaggagcgaacccacgccctcaagaccaaggagcgcatggcactggagggcatcggcattggcagtgggcagctgggcttcagccgccgctacggcgaggactacagccgctcccggggctccccgtcctcctacaactcctcctcttcgtcaccccgctatacctccgacctggagcaggcccggcctcagacgtcaggggaagaggaactgcagctgcagctggccctcgccatgagccgtgaggaggcagagaagcctgtccccccagcctcccacagggacgaggacctgcagctgcagctggctctgcgcctgagccggcaggagcacgagaaggaggtgaggtcctggcagggtgatggctcccccatggccaatggtgcaggggccgtggtccaccatcagcgggacagagagcctgagagagaggagagaaaggaggaggagaagctaaaaaccagccagtcctccatcctggacttggctgacatcttcgtacctgccctggccccgccctccacacactgctctgctgacccatgggacatcccaggttttaggccgaacacagaggccagtggatcctcctgggggccttctgcagacccctggtctccgatcccctcaggaaccgtcctgtcccgaagccagccctgggatctgactcccatgctctcctcctctgagccctggggcaggaccccagtgctgcctgctgggccccccaccacagacccctgggccctgaactctccccactacaaactccccagcactggggctgacccttggggagcctccctggagacctccgacacacctggtggtgcctcgacctttgacccatttgccaaacctccagaatccacagagaccaaggaggggctggagcaggccctgccctctgggaagcccagcagccctgtggagctggacctgtttggagaccccagccccagttccaagcaaaatggcacgaaggagccagatgccctggacctgggcatactaggggaagcactaacccagccaagcaaagaggcccgagcttgccggactcccgagtccttcctgggtccctcagcttcctccttggtcaaccttgactcgttggtcaaggcaccccaggttgcaaagacccggaaccccttcctgacaggtctcagcgctccgtcccccaccaacccgttcggcgcgggcgagacgggcaggccgacgctaaaccagatgcgcaccggctcgccggcgctgggcctggcaggcgggcctgtgggggcgcccctgggctccatgacctacagcgcctctctgcccctcccgctcagcagcgtgccagctggcttgaccctccccgcctcggttagcgtcttcccgcaggccggagccttcgcaccgcagccgctgctgcccacgccgagctcagccgggccgcggcccccgcccccgcagaccggcaccaaccccttcctctgagccccgccccgtcccataccggcctgcgcctgcgccggacgctccgcggccccgcctccggacccggggctgggcggggcgccggtgctagtggaacgccgtgccagtggcggctggtatcccgcggcggctctggaagctggacgcggaccacggcccgggagctagaaactgaacgcccgcataataaagactggaacccacgttctcagctctcaccaagtggactttttgcggggtgtggcggccgggtctcgaccacagcgtggatcaccggctgtttaggaaactgcagctgcacaacgtggggtgcaaaactgccccgcttcctttacagctcttctcaaccctcacctccatcccccgtcacccaggcaccttcgcttccagatgctgccaggctgtcactcaattcggtcatttcattcatttatcacacatgggcactggggttgggctaacagcaagagacaataggcctttgttcctatttattgggtactgcttacgtgctaagcagatcagtttatttaatgcttgcaacgactctctgaggtagaaaatattgttaattccgttcaggatcccggctacataatctgtggggctcaatacaaaataaaaatgtaggggctccttgttcaaaaaaaaaaaaaaaaa

SEQ ID NO: 101 - DNA, 5879 bp, Homo sapiens
cgccagggctgcgtaggcttgtggcgcgcccgcggagaggccggggctctgacgcccgctctgcggcttcggtgtttgaacaggccacagtccaggagcgcttacattcaggagctccgcgtagcacctgcccaaccaaactcagccctccgttaagatcctggttccatgccgcagtaggacagcaggcccaagtctgcacatcccagtgatgcaccatgccaatagtggataagttgaaggaggccctgaaacccggccgcaaggactcggctgatgatggagaactggggaagcttcttgcctcctctgccaagaaggtccttttacagaaaatcgagttcgagccagccagcaagagcttctcctaccagctggaggccttaaagagcaaatatgtgttgctcaaccccaaaacagagggagctagtcgccacaagagtggagatgacccaccggccaggagacagggcagtgagcacacgtatgagagctgtggtgacggagtcccagccccgcagaaagtgcttttccccacggagcgactgtctctgaggtgggagcgggtcttccgcgtgggcgcaggactccacaaccttggcaacacctgctttctcaatgccaccatccagtgcttgacctacacaccacctctagccaactacctgctctccaaggagcatgctcgcagctgccaccagggaagcttctgcatgctgtgtgtcatgcagaaccacattgtccaggccttcgccaacagcggcaacgccatcaagcccgtctccttcatccgagacctgaaaaagatcgcccgacacttccgctttgggaaccaggaggacgcgcatgagttcctgcggtacaccatcgacgccatgcagaaagcctgcctgaatggctgtgccaagttggatcgtcaaacgcaggctactaccttggtccatcaaatttttggagggtatctcagatcacgcgtgaagtgctccgtgtgcaagagcgtctcggacacctacgacccctacttggacgtcgcgctggagatccggcaagctgcgaatattgtgcgtgctctggaactttttgtgaaagcagatgtcctgagtggagagaatgcctacatgtgtgctaaatgcaagaagaaggttccagccagcaagcgcttcaccatccacagaacatccaacgtcttaaccctttccctcaagcgttttgccaacttcagcggggggaagatcaccaaggatgtaggctatccggaattcctcaacatacgtccgtatatgtcccagaataatggtgatcctgtcatgtatggactctatgctgtcctggtgcactcgggctacagctgccatgccgggcactattactgctacgtgaaggcaagcaatggacagtggtaccagatgaatgattccttggtccattccagcaacgtcaaggtggttctgaaccagcaggcctacgtgctgttctatctgcgaattccaggctctaagaaaagtcccgagggcctcatctccaggacaggctcctcctcccttcccggccgcccgagtgtgattccagatcactccaagaagaacatcggcaatgggattatttcctccccactgactggaaagcgacaagactctgggacgatgaagaagccgcacaccactgaagagattggtgtgcccatatccaggaatggctccaccctgggcctgaagtcccagaacggctgcattcctccaaagctgccctcggggtccccttcccccaaactctcccagacacccacacacatgccaaccatcctagacgaccctggaaagaaggtgaagaagccagctcctccacagcacttttcccccagaactgctcaggggctgcctgggaccagcaactcgaatagcagcagatctgggagccaaaggcagggctcctgggacagcagggatgttgtcctctctacctcacctaagctcctggctacagccactgccaacgggcatgggctgaaggggaacgacgagagcgctggcctcgacaggaggggctccagcagctccagcccagagcactcggccagcagcgactccaccaaggccccccagacccccaggagtggagcggcccatctctgcgattctcaggaaacgaactgttccaccgctggccactccaaaacgccgccaagtggagcagattctaagacggtgaagctgaagtcccctgtcctgagcaacaccaccactgagcctgcaagcaccatgtctcctccaccagccaaaaaactggccctttctgccaagaaggccagcaccctgtggagggcgaccggcaatgacctccgtccacctcccccctcaccatcctccgacctcacccaccccatgaaaacctctcaccccgtcgttgcctccacttggcccgtccatagagccagggctgtgtcacctgctccccaatcatccagccgcctgcaaccccccttcagcccccaccccacattgctgtccagtacccccaagcccccagggacgtcagaaccacggagctgctcctccatctcgacggcgctgcctcaggtcaacgaggaccttgtgtcccttccacaccagttgccagaggccagtgagcccccccggagcccctctgagaagaggaaaaagacctttgtgggagagccgcagaggctgggctcagagacgtgcctcccacagcacatcagggaggccactgcggctccccacgggaagaggaagaggaagaagaagaagcgcccggaggacacagctgccagcgccctgcaggaggggcagacacagagacagcctgggagccccatgtacaggagggagggccaggcacagctgcccgctgtcagacggcaggaagatggcacacagccacaggtgaatggccagcaggtgggatgtgttacggacggccaccacgcgagcagcaggaagcggaggaggaaaggagcagaaggtcttggtgaagaaggcggcctgcaccaggacccacttcggcacagctgctctcccatgggtgatggtgatccagaggccatggaagagtctccaaggaaaaagaaaaaaagaaagcaggagacacagcgggcagtagaagaggatgggcatctcaaatgcccaaggagtgccaagccccaagatgctgttgtccccgagtccagcagctgcgcaccatccgcgaatggctggtgtcctggggaccgcatggggctgagccaggcccctcctgtgtcttggaatggagagcgggagtctgatgtggtccaggaactgctcaaatactcatctgataaagcttacgggagaaaagttctgacctgggatggcaagatgtcggcggtcagtcaggatgctattgaagacagcagacaggcccggactgagaccgtggttgatgactgggacgaagagtttgaccgagggaaggaaaagaaaattaaaaaatttaagagagagaagaggagaaacttcaacgccttccagaaacttcagactcgacggaacttctggtctgtgactcacccagcaaaggctgccagcctcagctatcgccgctgactgtgcccctgtggaaggaggtcggttccgagggggtgggtgtaagggtgaggtgggggtgtgtgtgccgtgtatgtgtgtaggggtgtggtggggtgtggcgtgtgtgtatgatgtatgtgggctgtgtatctggcacatgtgtgttgggtggtgtgtgtggtgtgggcgcgtctgtggtgtgtgtcctagtcacttggagaagggtgtgtgtgggatgcgtgtgtataagggggtgtgtgtgggatgcgtgtgtataagggggtgtgtgtagtgtgtgttgggtgtggggtgtgtacacctggcatctgtggcatgtgttctggtcacttggagaagggcatgtgtggggtgtgtgtgggatgtgggttgtgtgtatatctggcatgtgtcccagtcacttgcagaagggtgacttcttgccagccgcatcgagatgccatgcattgggttcctaggttggactcatacccgagggtggcagtgggaagattcgggtctcgtttctctctgtcaggactaccgtggtttgttctgcagcctcctggagacaaggcgtcccttcccgggagctgtcggtctggatctgagggagctctctgtgtgggctctgctgtgctgggagcctgtcacggtaggagctctcccggtaccagtgtccacagaccgcccaacatagaggctttgaggcttctctagatcggaacctctttggtgacattcccgaccagccctgcaagagaaacgacagtgtgtgtgtgagcagaggtggctgcacacctgctggacatctttgccaggctgtgccttctcatgtttcatagacagtggtctgtgctggcagaggctgctgcccctggttggggctatcaggagagtgggggatggtggccacatgtcctccaggtggtctcccggtgcatagctggtggctctgggcaagccatcccttgcttctcggggctgacgccaccgttgtgtccgagcccgccctcccctgcttcctcagcgggaccccttcatctgttggccttacctgtcctcagaaaggaagaggtgaccccacccagccacctctcccttttatggaactcgagagggtggccctactgtgcaccccttccttgtgagtagctctcaactgtcctggagagcagaggctatttggggtcggaggagccctcgatacctgcgaatacatctgctttccaggctgctgtttattctgagacgactgtgctgtagcttcccttgcagctgcaataacccgcaggtcttcactgaggtggaggctttggggtagaattctccatttattttactacttaatacaaaacatttatttttgaccagtcctgtggcttccattagcaatatgtttcctttcccaaatatgcaaatagtggctttgtttgctcaattttgtgagtgctttggaatttaaatgattgtataactcaagaagattacttttctatgttgctcaagctgtgcctgccaacttgtaacttaataaatacaggaaatcctcagagaaggtgatattttcaggaaaaagacaaatgccctcatagtagtgggaagtgtgaaggtgaccgtgaacatccttcctcatcgggtctgtccccgtcatttcctcccggagtcgtcgcaggtggagatggacaacgtggtgttggacttagacctccttcagtgtggctctgctgggccagaggcatcctgctgtcccgggtggctgcctcgctgtctgcaccccctctccctggggcagctttgcttcctgcccctgtgctcggggcctgggtggttactggcgtgtagatggaattgcttttttaatatgggaagatacatttatttttttccatgtgggtgggtgtctctttttggattttcttctgtttttacgtttctcttcttagaagggtgggagagaatcaagctcctgtggccacctgtgtcccagcagcagtgagtggagctgctcagggtgccctctcctgcggaccagtctctgaatgttcaaagatgagggcctggcttccgtgctctggctttgtaacttatctggaagggaaagcacatgccttcacgggcaggatgatcaagcggtgctgattcacgagagtggaagcctccagagcttggggctttctggctgctcttcattgacctgtgtgttcccagcacacgaacagcgcccctaacggagatttgttcagcgactgaatatacacctgtaaacgagtagcatgtatacattgattttgattacaaatggttctgtattat

SEQ ID NO: 102 - DNA, 1889 bp, Homo sapiens
ccgggtggatggagttggaggggcggggtgctggcggtgtggcgggggggcaggcggcagggcccgggcggagccccggggagtcggcgctgctggacgggtggctgcagcggggcgtgggccggggggccggcggcggggaggccggggcctgcaggcccccggtacgacaagatccggactccggcccggactacgaggcgctgccggctggagccactgtcaccacgcacatggtggcaggcgccgtggcagggatcctggagcactgcgtgatgtaccccatcgactgcgtcaagacccggatgcagagtctacagcctgacccagctgcccgctatcgcaatgtgttggaggccctctggaggattataagaacggagggcctatggaggcccatgagggggctgaacgtcacagcaacaggcgcagggcctgcccacgccctttattttgcctgctacgaaaagttaaaaaagacattgagtgatgtaatccaccctgggggcaatagccatattgccaatggtattgagccttcctgtgctggttcccccactttcccaactctttgggctttgctgctgtcagtgctttccagtctcagcatggtttggagctgaagctttgggctgggataggccactggtggcaggtgatgtgctggcatccctaggcagcagtgtatctgcttcctgtctggggtgtgagctgcatttattctcagaatgatctttattgataagacttgagctggccttcctatcatggatgtggaatacattagtgaccttacaaagttggtgggaacagatactttaccttcttaaacaggagtttaggagcagtgggtccccatcttttggactagctcttaacgttacttttccccgctgtagtgtagcacagccactccccttcactgggggacctcagtgagttggtcagctctcttggccttacatgtggcagttgttttcttgtttgcaggtgcggccgggtgtgtggcaacattacttcatgatgcagccatgaaccctgcggaagtggtcaagcagaggatgcagatgtacaactcaccataccaccgggtgacagactgtgtacgggcagtgtggcaaaatgaaggggccggggccttttaccgcagctacaccacccagctgaccatgaacgttcctttccaagccattcacttcatgacctatgaattcctgcaggagcactttaacccccagagacggtacaacccaagctcccacgtcctctctggagcttgcgcaggagctgtagctgccgcagccacaaccccactggacgtttgcaaaacactgctcaacacccaggagtccttggctttgaactcacacattacaggacatatcacaggcatggctagtgccttcaggacggtatatcaagtaggtggggtgaccgcctatttccgaggggtgcaggccagagtaatttaccagatcccctccacagccatcgcatggtctgtgtatgagttcttcaaatacctaatcactaaaaggcaagaagagtggagggctggcaagtgaagtagcactgaacgaagccaggggttcagatgacactgctgcatcctggtcacattctctgtctcctggaatgctcccacctcaagtggagttagaaggaaggtagaggggctctcccccaggattttggtgttttgactaacaccagttcctgccaacctctgttgccaccacctttccttccaggccctaagcacgtgcagcaaagcacaccacagcacctttgataacctctctccatcctgggcctgatgacctgctctagactgttatagagggataagcagctcattcccctggttcctaataaaaagcctttaaatt

SEQ ID NO: 103 - DNA, 2354 bp, Homo sapiens
gttccctgtcatcagtatgcagcgattgctctttccgccgttgagggccttgaaggggaggcagtatctgccgctcctggctcctagggcagcgcctagagcacagtgtgattgcatcaggcgccctttgaggccagggcaatacagcaccatctctgaagtagctttgcaatctggaaggggtacagtgtcccttccctcaaaggctgctgagcgggtggtgggccgatggctcctggtctgcagtggaacagtggctggagcagttattcttggtggagtaactaggttgacagagtctggcctctcgatggtagattggcatttaataaaggagatgaagccacctacaagccaagaggaatgggaagcagaattccaaagataccagcaatttccagaatttaaaatcttgaatcatgatatgacactgacagaattcaagttcatctggtacatggagtactcacaccgaatgtggggtcgccttgtaggccttgtgtacatcctgcctgctgcctacttttggagaaagggctggctcagccgtggcatgaaaggacgtgttcttgccctctgtggcctcgtctgcttccagggtctgttgggatggtatatggtgaaaagtggactagaagaaaaatcagactcccatgacatccctcgggtcagtcagtaccgccttgctgcccacctgggatcagccctggttctttattgtgccagcttgtggacctcactgtcactgctactccctccgcacaagttgcctgaaacccaccaactcctacagttgagacgatttgctcatggaacagcaggtctggtgttccttacggccctctcaggggcttttgtggcagggctagatgctgggcttgtttataactcctttcccaaaatgggagaatcctggatcccggaggacctctttaccttctcccccatcctgaggaatgtttttgagaatcccaccatggtgcagtttgatcaccggattctgggaatcacttcagtcactgccattacagtgctctacttcctctctcggagaattccccttcctagaaggaccaagatggcagcagtgactctgctggctttggcgtatacacaggtgggcttgggcatcagcacgctgctgatgtatgtcccaactcctctggccgccactcaccagtcaggctccttggctttgctcactggtgctctttggctgatgaatgaactccgaagagtcccaaaatgattcttagaggaccagcctcctgggactgtgactgcttttgagagctcttcagagatcataagaacttgggcttttctacgagatgaccttgacataccaagtggtttccaaatggtcaacttacttaaaaatcttttcctgttttgagatagtcactggatcaagaatgcattaagtgtggttaccctaaatgttcccttttaaatctgcttttcatgttgaaaatcagttttaatgtagagaaagaaatgtctgccatttgctgcttaacaggctttgtgtcaggtttttcagtgttggcaagctcttggttctacgtggatgatttctacgtggatgttctcctgagtccttaattctgcctaaatagaatttctttatgatcttaacttcacttccattaggtgaagattgaaaggataggattgacatacccaaagtagccagctggtcttcagcaaaaaaaaaaaagctaatgtcttctaatatcctgattttcagaaatggggaaattgcagattttgacaagcttaatgtgtatatgtagcaaaatggtttttaagtacttggaaaaggaggtaatcgccaaatagttccatttttttttttttttttgagacagagtttcactcttgttgcccaggctggagtacaatggcgtgatctcagctcactctgcaacctccacttcccaggttcaagcgattctcatgcctcagcctcccgagtagctgggactacaggcacaagtcaccatgcctggctaattttgtatttttagtagagaaggggtttcaccacattggccaggctggtcttgaactcctgacctcaggtaatccgcccatctcggcttcccaaagtgctgagattacaggcatgggccaccacgcccagctagttcctcttttgataaggctgttaacattacaaggtcagagagaggaatggaatcgacagtataaattggttcctgagagggtttcctaacagctttgtaataagaaaaatatggccttgatggtgtagtgcatggacatctacccagataaacaaattgttgactgctgaaaaaaaaaaaaaaaaaaaaaaaaaaaaaaaaaaa

SEQ ID NO: 104 - DNA, 1370 bp, Homo sapiens
ggggcacccactggaaggagaggccaggcggaagaccctggctccgtcatggcctctgccctgaggccaccccgtgtccccaagcctaagggtgtcctgccttcacactactatgagagctttctagagaagaaggggccctgtgaccgggattacaagaagttctgggcaggcctgcagggtctcaccatttatttctacaatagcaatcgggacttccagcacgtggagaagctcaacttgggagcatttgagaaactcacagatgagattccctggggaagctcacgtgaccctggcacccacttcagcctgattctccggaatcaggagatcaagttcaaggtagagaccttggagtgtcgggaaatgtggaaaggcttcatcttaacggtggtggagctccgtgtcccgaccgacttgaccctgcttcctgggcacctatacatgatgtctgaagtcttggccaaagaggaggcgcgccgtgcactggagacaccctcgtgcttcctgaaggtgagccggctggaggcacaactgctcctggagcgctaccccgagtgcgggaacctgctgctgcggcccagcggggacggcgccgacggcgtgtcggtcaccacgcggcagatgcacaacgggacgcacgtggtccggcattacaaggtgaagcgggagggccccaagtacgtgatcgatgtggaacagccgttctcttgcacctccctggacgccgtggtcaactatttcgtgtcgcataccaaaaaggcgctggtgccattcctgttagacgaggactacgagaaggtgctaggctacgtggaagccgataaggagaatggcgagaatgtgtgggtggcgccctccgctccgggcccaggtcctgcaccctgcacaggtggccccaagccgctgtcacctgcgtctagccaggacaagctgcccccactgcccccactaccgaaccaggaagagaactacgtgacccccattggagatggcccagctgttgactatgagaaccaagatgtggcttcctctagttggccagtcatcctgaagccaaagaagttgccaaagcctcctgccaagcttccaaagccacccgttggacccaagccagagcccaaagtctttaatggtggcttgggcaggaagctgccagtcagttcagcccagcctctcttccccacagccgggctggcagacatgacggcagagctacagaagaagctggagaagaggcgggcactggagcactgattcggacacaccagggaccagcgggctagtcccagggcatggcccagcggccagattctttttcccaggattaaaactctgaccccaggaaaaaaaaaaaaaaaaaaaaa

SEQ ID NO: 105 - DNA, 2160 bp, Homo sapiens
ccagaacacccctatcttctaggattgacactggctgtcaaactcatccttcaaggtgattcctggcctgccctcctcctccaggcagcctgtcctcctcctccaggcagcctgtcctgaccctcagcagcctctcctggccttggcagagcccctcgtgtcctcccttgcagcacgcatgggaagaaaggccatcgtcctcgccattgctaacaccagccttgcgtttcctctttgccagcacctggtgacgttctgcctgggtgaggacgatggcgtgcataccgtggaggatgcctccaggaagttggccgtcatggatagccagggccgagtctgggcacaggagatgctgctgcgagtgtctcccgaccatgtcacgctgctcgacccggcctccaaggaggagctggagtcgtacccactgggcgccatcgtgcgctgtgacgcggtgatgccacccggcaggagccgctcgttgctgctgctcgtgtgccaggaacccgagcgcgcgcagcccgacgtgcacttcttccagggcctgcgcctcggggcggagctgatccgagaggacatccagggggctctgcacaattaccgctcgggccgcggggagcgcagggcggcggcgctcagggccacgcaggaggagttgcagcgcgaccgctcgcccgccgctgagaccccgcccctgcagcgccgcccgtcagtccgcgcagtgatcagcaccgtagagcggggcgcgggccgcggacgaccccaggcgaagcccattcccgaggcagaggaggcgcagaggcctgagccggtggggacctcgagcaacgctgactcggcctccccggacctgggtccccggggtcctgacctggcggttctgcaggcggagcgggaagtggacatcctgaaccacgtgttcgacgacgtagagagctttgtatcgaggctgcagaagtcggcggaggcggccagggtgctggagcaccgggaacgcggccgcaggagccggcgccgggcggctggggagggcttgctgacgctgcgggccaagccgccctcggaggccgagtacaccgacgtgctgcagaagatcaagtacgccttcagcctgctggcccggctgcgcggcaacatcgccgacccctcctctccggagctgttgcacttccttttcgggcctctgcagatgattgtgaacacgtcgggggggccggagttcgcgagcagtgtgcggcggccgcatctgacatcggatgccgtggcgctgctgcgggacaacgtcactccacgtgaaaacgagctctggacctcgctgggggactcgtggacccgccccgggctggagctgtccccggaggagggacccccatacagacccgagttcttcagcggctgggagccgccggtcactgacccgcagagccgcgcctgggaggacccagttgagaaacagctacagcacgagcggaggcgccggcaggtgacccaagcgacacagcagggccgaggctgggaagtccgggggcgcggccggtccgcctggccccgcctgacccgactgtcttacttcctacagcaaagcgccccccaggtcgctgtcaatggtcaccgagacttggagccagaatctgagcctcagctggagtcagagacagcaggaaaatgggtcctgtgtaattatgacttccaggcccgcaacagcagtgagctgtcggtcaagcagcgggacgtactggaggtcctggaggacaaagagaaagtgtcagagctggaggcagtgatggagaagcaaaagaagaaggtggaaggcgaggtggaaatggaggtcatttgacctgccaggcgcccttcgcaaagagtgacgaggccccgtgggagaacggactcctcagactctccccaatagcggaagtcgatcttctgaaggatggccaatctgctccggccctggtcttcccccatcccggtggacagacttaacgatccttgctgcagtccctccggagaggatctggactggctgggagtggggagggcgtggagacagtctacggaaagcgctagcagacccccgagagggtgcagtggagccctgagcattgtaatatgcggcccagcctataaacagcctccgtgcttaaaaaaaaaaaaaaaaaaaaa

SEQ ID NO: 106 - DNA, 571 bp, Homo sapiens
gcatatacatacaggtttatttaaatgattggatctacacttttggaggctatttgaagtatcttatcaaaataaaacgcattttaagcaagaagttaaaaaagcttttcagacccgaaggccatttaatacagtaaatcttacttgggtagtttagcaaacattttttaaaacccacatccaacagattggttagtattagatacacagatttggtttcaaagctgaaatacccctggtggaataaatcttctcatgaaattcagttatattatgccacaaaacagggacacttatctattgacaacttaaatattaactcagtgggctacctggtgatataaataggaaaaaaacagtggtcatggattaggagtgagaagactatgacaccagcctaccttggactgggaccgcaaaggatgttaaaatctatcctagaatttaaaacaggagaaatgtcaaatattccagtctccattcggctcaagccatcgcccaaggaatacacccccaccccagccccacatgaggtttactaaccagctgctacagatgttactatgtcact

SEQ ID NO: 107 - DNA, 644 bp, Homo sapiens
  misc_feature (1)..(644): n = a,c,t, or g
gcatcctcctgccttggcctcccgagtagctgggactacaggcgcacaccaccatgccaagctaatttttaaatttttttgtagagatggggtctcacttttgttgcccagggtgctttagaacccctgggctcaagtgatccttgacctcccacagtgctgggattacaggtgtgagccaccgtgcctggcctcatgggttttctttgttttgttttgttttgtttttgagacagagtctcactctgtcactcaggctggagtgcagtggcacgattttggctcactgcaacctccaccttccgggttcaagcgattctcctgcctccgcctcccgagtagttggggttacaggcatgcgctaccacacctggctagttttttattgttgttgttttttgtatttttagtggtgacggggtttgctctgttggccaggctggtctcaaactcctgacctcaggtgatccccacttcagcctcccaaagtgctgggatgacaggcatgagcctctgcacctggcctcgtgtnttttttttagttagccattttatacgtgtttactgaacacctgtcctgtgcccatattctaagtgccttacctgcattaaactcatgtaaccttcacaacccgaaaaaaaaa

SEQ ID NO: 108 - DNA, 448 bp, Homo sapiens
tttttttgggaacatttactaatcttttatttgcttttcttggcactcataacattttttaccctttaaaacagattcaagtgattcaaattccagttacctctaagttatattctgttaacaaccaccttgtataaattggtttcataaataaaaactgctcttaaatgattctgtcagtggatgtctatccacaagctttccagcctggtctgctttatgtgtacatcctgaaaatttgccaaaatagcagcaacaactgatgatatcatagggaaaaaactcactgccacaagaaaccaagcattgttgagtcaacttctttttggtcacttgttttatacttactagataagccaaaagacctgtttgttacacaaacatgcatgcatccaggtattaatccattctcacactgctatgaagaaatacccgagactgggtaatt

SEQ ID NO: 109 - DNA, 3319 bp, Homo sapiens
ggcccggcccgcggcggcggcaaaggggcggaggggttcgctgccagcaattgccaagctgctgcggtcgtggcgggatggtatagccgggcctgagggcgggcggcggggcgcgggcgggggcgaggcggccgggaagggccgacgccgcctgactggcttgggagcagcggcagcaagctgagggggcgtcgccgccgccggcccccggcgccgccgcgggaggccgcgcccgccatggcggcccgggcggtgctggacgagttcactgcgccagctgagaaggcggagctgctggagcagagccgcggccgtatcgagggcctgtttggcgtgagcctagccgtgctcggcgcgctaggggctgaggagccgctgcccgcgcgcatctggctgcagctctgcggggcgcaggaggcggagcacagcgccaaggaatatattaaaggaatctgtgaacctgaactagaagaaagagaatgttaccccaaggacatgcactgcatttttgttggggcagagagcctgtttctgaaaagcttgattcaggatacttgtgctgacctctgcattctggacattggccttcttggcatcagaggaagtgctgaggctgtggtcatggctaggagtcacattcaacaatttgtaaagctctttgaaaataaagagaacctacccagtagtcagaaagaatcagaggtgaaaagggaattcaaacaatttgttgaagcccatgcagacaattacacaatggatttgttgattttgcccacttccttgaaaaaagaacttttgacactcacacaaggtgaggagaatctctttgaaacaggagatgatgaggttattgaaatgagagattctcaacaaacagagtttacacagaatgctgccacagggctgaatatttctagagatgaaactgttttgcaggaagaggcaagaaataaagctgggactcctgtttctgagcttacaaaacaaatggacacagtcctttctagctcaccagatgtgctttttgatccaataaatggtctaaccccagatgaagaggcactttccaatgagagaatttgtcagaaaaggagattttctgattctgaagaaaggcatacgaagaagcagttttctttggaaaatgttcaggagggggagattttacacgatgctaagacattggctggaaatgtaatagctgacctatctgattcttctgctgattctgaaaatttaagtccagatataaaagaaactactgaggaaatggaatacaacatcctcgtaaacttttttaaaaccatgggctactcccaagaaattgttgaaaaggtcattaaggtgtatggaccatctactgaaccattattgctcttagaggaaattgaaaaagaaaataaaagattccaagaagacagagaattttcagctggtacagtgtatccagagaccaacaaaaccaaaaataaaggtgtttatagcagcacaaatgagcttacaactgattccactccaaagaaaacacaggctcacacacagcaaaatatggtagaaaaattttctcagttaccattcaaagtggaagctaaaccatgtacctcaaattgtagaattaatactttcagaacagtgccaatagaacagaaacatgaagtctggggttcaaaccagaactacatttgtaacacagaccctgaaactgatggcctttcaccttctgttgcctctccaagtcccaaagaagtcaattttgtttcaaggggagcttcaagtcaccagcccagagttccactttttcctgaaaatggtttacaccagcagccagaacccttgcttccaaataatatgaaatctgcctgtgaaaaacgtttaggatgttgtagttctcctcattctaagccaaattgctcaaccctttctccaccaatgccactgccccagctgttaccttcggttactgatgcaaggtcggcaggaccttctgatcatattgattcctcagttactggggttcaaaggtttcgagatactctaaaaataccctacaagctggaattaaaaaatgaaccagggagaacggatttgaaacacattgttatagatgggagcaatgttgcaattacccatggtctgaaaaagttcttttcttgtcgtggaattgcaattgcagttgaatatttttggaagcttggcaacagaaacatcactgtatttgtccctcagtggagaacaaggcgtgatcctaatgtcacagaacagcacttcttaacccagctccaggagctcggaatattatctttaactcctgcccggatggtctttggagaaagaattgcttctcatgatgacaggtttctactacacttagcggacaaaactggtggcataattgtgacaaatgataatttcagagaatttgtgaatgagtcagtctcttggagagaaattattacaaaaaggctgctgcagtacacgttcgtgggggacatatttatggttcccgatgatcctctgggaagaagtggacctcgattagaggagtttcttcagaaggaagtctgtcttagagatatgcagcccctactcagtgccctgccaaatgtgggcatgtttgaccccagcttcagagtccctggcacccaggcagccagcaccagccaccagcctccgacccggattcagggagccccttcaagccactggctccctcagcagccccacttcccactgctgccagccctccccagtctccagcagaacctgcccatgccagctcagagatcttctgcagaaaccaacgagctgagggaagcccttctgaagatcttccctgactcagagcaaagactgaaaatagaccagatcttggtggcccacccatacatgaaagatctaaatgcgctttctgccatggtgttggattgaagattgtgctgagcgctgagcttgcgctcagggctggctgatcaaactcaagctcacacctgtacctgatgggaatgaacataatgtgaagaaacttatttcccagtgtaaacgcagttgtacagaaaaaaaatgttttgggtataaatctgggttttcaaaaccagcttttttctatatataaattatgctgctattacagatttaacattttctgttaaaggaaagtctacattttctgcctgttcagaactgtttaatagcagttactcttgagtgtatttacctttttatgttttttaaactattttccttaaagccgaaaatattgacaaatggatatggttagcctttataaataaataaaaaaaaaagtgttgctttcttaagg

SEQ ID NO: 110 - DNA, 531 bp, Homo sapiens
  misc_feature (1)..(531): n = a,c,t, or g
ttttttttcaaactgcaaaacccgttttatttttaataaaaggcctcacttccaaggagagcccagcccaggagatccccggtgaatcgtcaagcctgggtcctcggggagccggcgttcctgctgagctgatgttgtacttctgaaggcctgtgatcgctaactgcaccatgaggcagaatncangggtgctctcaaccagctgggggttggggttcaggctttttttcatctttcggccaaggcagacaacaacggactcatcatcccacgcgactgagtgacgcgaggcttcaaacgcaagcacgagtgtttagaatcctgcattttcaaaggctcttgcccactgggaactacatggagaggagattaagaacaacaaccaaaagaggcagggggtggggcaggcttgaggtaggggtgggntgggntgacagtcaacacagctnggaccagaagnccatggnccctggctccctggaaaggcacagggcacagacggatgccgccttttcttgctgggacactcct

SEQ ID NO: 111 - DNA, 10802 bp, Homo sapiens
gtgtcggacggcatgacaggcagcaatcctgtgtcccctgcctcatccagttccccagcctctagtggggcaggcggcatctccccgcagcacatagctcaagattcctcactggatggacctccaggccccccagatggtgccacagtgcccctggaggggttcagcttatcccaggctgctgacctggctaacaagggcccgaagtgggagaagagccatgccgaaattgcagaacaggccaagcatgaggccgagatcgagactcggattgctgagctgcggaaggagggtttctggtcactgaagaggctgcctaaggtgccagagccccctcgccccaaaggtcactgggactatttgtgcgaagagatgcagtggctctctgctgactttgctcaggagcgccgttggaaacggggtgtggcccggaaggtggtgcgcatggtgatccggcaccacgaggagcagcggcagaaagaggaacgggcccggagggaggagcaggccaagctgcgtcgaattgcttccaccatggccaaggatgtcaggcagttctggagcaatgtggagaaggtggtgcaattcaagcaacagtcccggcttgaggaaaagcgcaaaaaagccctggacctgcatttggacttcattgtggggcaaactgaaaagtactcggaccttctgtctcagagcctcaaccagccattaacctccagcaaagcaggctcttccccttgcctcggctcttcctcagctgcctccagtcctccaccccctgcttctcgcctggatgatgaagatggggactttcaaccccaagaggatgaggaagaggatgatgaggaaacgattgaagttgaagaacaacaggaaggcaatgatgcagaggcccagaggcgtgagattgagctgcttcgccgtgagggagaattgccactggaagagctgctccgttcccttccccctcagctgttggaagggccttccagcccctctcaaaccccctcatctcatgatagtgacacccgagatgggcctgaagaaggtgctgaagaagagccccctcaggtgttggagataaagcccccaccctctgctgtcacacagcgcaacaaacagccttggcatccagatgaagatgatgaagagtttactgccaacgaagaggaagcggaggatgaagaggatactatagcagctgaggaacagttggaaggggaggtggatcatgccatggagctgagcgagttggctcgagaaggtgagctttccatggaggagctattgcagcagtatgcaggagcctatgccccaggctctgggagcagtgaagatgaggatgaagatgaggttgatgctaatagctctgactgtgaaccagaggggcccgtggaagcggaagagcctcctcaggaggatagtagcagtcagtcagactctgtggaggaccggagtgaggatgaggaagatgaacattcagaggaggaagaaacaagtggaagttcagcatcagaggaatctgagtctgaagagtctgaggatgcccaatcacagagccaagcagatgaagaggaggaagatgatgattttggggtggagtacttgcttgccagggatgaagagcagagtgaggcagatgcaggcagtgggcctcctactccagggcccactactctaggtccaaagaaagaaattactgacattgctgcagcagctgaaagtctccagcccaagggttacacgctggccacgacccaggtaaagacgcccattcccctgcttctgcggggccagctccgggagtaccagcacattgggctagactggctggttaccatgtatgagaagaagcttaatggcattcttgctgatgagatggggcttgggaagaccatccagaccatctctctgcttgcccacttggcttgtgagaaaggtaactggggtccccatttaatcattgttcccaccagcgtgatgttgaactgggagatggagttgaaacgttggtgccccagctttaaaatcctcacttactatggagcccagaaagagaggaagctcaagcggcagggctggaccaagcccaatgcctttcatgtgtgtatcacatcttacaagctggtgctgcaggaccaccaggccttccgtcgcaagaactggcgctatctcattctggatgaggcgcagaacatcaagaacttcaagtcacagcgctggcagtcactcctcaacttcaacagccagagacgcctgctcctgacaggaactcccttgcagaacagcctcatggagctgtggtccttgatgcactttttgatgccccatgtcttccagtctcatcgcgagttcaaggagtggttctctaatcccctaactggcatgattgagggcagccaagagtataatgaaggtctagtcaaacgcctccacaaggttttgaggccttttttactgcgccgagttaaggtggatgttgagaagcagatgcccaaaaagtacgagcatgttatccgctgcaggctctccaagcgtcaacgctgtctctatgatgacttcatggcacagaccacaactaaggagacactagccacaggccatttcatgagcgtcatcaacattttgatgcagctgagaaaagtttgcaatcatccaaatctgttcgaccctcgaccggttacctcccctttcatcaccccaggcatctgcttcagcaccgcctctctggtgctaagggccacggatgtccatcccctccagcggatagacatgggtcgatttgaccttattggcctggaaggtcgtgtctctcgatatgaggcagacacatttctgccccggcaccgcctctctcgccgggtactgttagaagtggctactgctcctgaccccccaccccggcccaagccagtcaagatgaaggtcaacaggatgctgcagccagtacctaagcaagaaggccggacagtggtggtggtgaacaacccacgggcgcccctgggccctgtcccagttcgacctcctccaggtcctgagctctcagcccagcccacccctggcccagtcccccaagtgctgccagcatcactgatggtttcagcctcacctgccgggcccccgcttattcctgcatctcggcctcctggccctgtcctcttgcctccactgcagcccaacagtggttctctcccccaggcaggcgaagtggtcagcatcgggcagttagcctcactggcacaacgtccagtggctaatgcagggggaagcaaacctctcaccttccaaatccagggcaacaagctgactttgactggtgcccaggtgcgccagcttgctgtggggcagccccgcccgctgcaaatgccaccaaccatggtgaataatacaggcgtggtgaagattgtagtgagacaagcccctcgggatggactgactcctgttcctccattggccccagcaccccggcctccgagctctgggcttccagctgtgttgaatccacgccccacgttaacccctggccggctacccacacctactctgggtactgctcgagcccccatgcccacacccactctggtgaggcctcttctcaagctggtccacagtccttcacctgaagtcagtgcttcagcccccggagctgcccccttgaccatctcttctcctctccacgtgccatcctcactccctgggccagcctcttctccaatgccaattcccaactcctctccccttgctagtcctgtgtcctctacagtctcagttccattgtcatcttcactccccatctctgtccccaccacacttcctgccccagcctcggctccactcaccatccccatctcagcccccttgactgtttctgcttcgggcccagctctgttgaccagtgtgactccaccattggcacctgttgtcccagcggctcctggacctccctccttggcaccatctggtgcttccccgtcagcatcagccttgactctaggtttggccacagctccatccctgtcttcatctcagacacctggtcaccctctgttgttggctcccacctcttcacatgttccagggttgaactcaaccgtggccccagcatgctcacctgtcctggtgccagcttcggctctggccagtccttttccgtcagcaccaaatccagctccagctcaggcttcccttctggctccagcatcttctgcatctcaggctctagccacccctctggctcctatggcggctccacagacagcaattctggctccttctccagctcctcctctggctcctcttccggtcctggcaccatcgccaggtgctgctcctgtcctggcttcatcacagactccggttccagttatggctccatcgtctactccaggaacctctttagcctcagcttcaccggtaccagctccaacccctgtgttggctccatcatcaactcaaactatgctaccagccccggttccgtcacctctcccgagcccggcttctacgcagacactggccctagccccagctttagcacccactcttggaggctcatctccatctcagacactctctttgggaacggggaacccccagggaccctttccaactcagacattgtcattaactccagcatcatccctggtaccaactccagcccagacactgtctttggcaccaggaccaccactgggtccaactcagacgctgtctctggctccagcaccccctctggctccagcttctccagtgggcccagccccagctcacacgctgactttggctccagcatcgtcatctgcttcactcctggccccagcttcagtgcagacactgaccttgagccctgccccagttcctaccctgggcccggccgcagctcagaccttggcgctggccccagcctccacacagtccccagcttcccaggcatcttcccttgtggtttcggcatctggtgccgctcccttgcctgtcaccatggtatcccggctgcctgtttccaaggatgagcctgacacactgacattgcgctctggtccccccagccctccctccactgctacctcgtttggtggcccccggcctcgacgccagccccccccaccacctcgttcccctttttatctggactccctggaggaaaagcggaagcggcagcggtctgaacgcctggaacggattttccaacttagtgaggctcatggggccctggcacctgtgtatgggactgaagtcctggatttctgtaccctgccccaacctgttgccagccccatcggccctcgttctcctggccccagccaccccaccttttggacttataccgaggctgcccaccgggctgtactgtttccccagcagcgactagaccagctgtcagaaatcattgagaggttcatctttgtcatgcctcctgtggaggcacctcccccttccctgcatgcctgccacccacctccttggctggccccacgtcaggcagccttccaggagcaattggcctctgagctctggccccgggctcgtcctttgcaccgtattgtgtgtaacatgcgcacccagttccctgacttaagactcatccagtatgattgcggaaagttgcagacgttggcagtgctgttgcggcagctcaaggcagagggccaccgagtgctcatcttcacccagatgacccgaatgctggatgtattggagcagtttctcacctaccatggccatctctacctgcgcctggatggatctactagagttgaacagagacaggccttgatggaacggttcaatgcagacaaacgcatattctgcttcatcctttcaactcggagtgggggtgtgggcgtgaacctgacaggagcagacactgttgttttttatgacagcgactggaatcccaccatggatgctcaggcccaggaccgctgtcaccgaattggccagacccgggatgtccacatatataggcttatcagtgaacggacagtggaggagaacatcctaaaaaaggcaaatcagaagagaatgttgggggacatggccattgagggaggcaacttcaccacagcctatttcaaacagcagaccatccgagagctgtttgatatgcccctggaggaaccttctagctcatccgtgccctctgcccctgaagaggaggaagagactgtggccagcaagcagactcatattctggagcaggcattgtgtcgggcagaagatgaagaggatatccgtgcagccacccaggccaaggctgaacaggtggctgagcttgcagaatttaatgagaacgatgggtttcctgctggtgagggagaggaagctggccggcctggggctgaggatgaggagatgtcccgggctgagcaggaaattgctgccctcgtagaacagctgacccccattgagcgctatgccatgaaattcctggaggcctcactggaggaggtgagccgagaggagctcaaacaggcagaagagcaagtggaagctgcccgcaaagacctggaccaagccaaggaggaggtgttccgcctaccccaagaggaggaggaggggccgggggctggggatgagagttcctgtgggactggtggaggcacccaccggcgcagtaaaaaggccaaagcccctgagaggccggggactcgtgtcagtgagcgtcttcgtggagcccgggctgagactcaaggggcaaaccacactcctgtcatatccgcccatcaaactcgcagcaccaccacaccaccccgctgcagtcctgccagggagcgagttcccaggccagcacctaggcctcgacccactccagcttcagctccggctgcaattcctgcccttgttcctgtcccagtttctgccccagtacccatttcagccccaaatccaataaccattctccctgtccatatcttgccttctcctccccctccttcacagattcctccttgttcttctcctgcctgcacccctcctcctgcctgtacccctccaccagctcatacaccgcctccagcccaaacctgtcttgtaactccttcctctcctctcttgcttggtccaccttctgtgcccatctctgcctcagtcactaatctccccttgggcttgaggcctgaggcagagctgtgtgcccaggcattggcatctccagagtccctggagctggcttctgtggccagttcagaaacctcctcactttctcttgtgccccctaaagatctgttgccagttgctgtggagatcctgcctgtgtcagagaagaacctttctctcaccccttctgcacccagcctgaccttggaggctggcagcatccccaatggtcaagagcaggaggcaccagattctgctgaggggaccacccttacagtgctgcctgaaggtgaggagttgcccctgtgtgtgagtgagagcaatggcctggagctcccaccctcagcagcatctgatgagccacttcaggagccactggaggctgacaggacctcggaagagctgacagaggccaagaccccaacctccagcccagagaagccacaggaactcgttacagctgaggttgcagctccatccacctcatcttcagccacttcctcgcctgagggtccttcacctgcccgacctcctcggcgtcgcaccagtgctgatgtggaaattaggggtcaagggactggtcggccaggacaaccaccaggccccaaagtgcttcgaaagctgccaggacggctggtaactgtggtagaggaaaaggaactggtgcggcggcggcggcagcagcggggagctgccagcaccctagtgcctggggtctctgagactagtgccagcccgggaagcccgtctgtccgcagcatgtcagggccagaatcctcccctcccattggtgggccctgtgaagctgctccttcatcctcactgcccactccaccccagcagcccttcattgctcgccgtcacattgagctgggggtgactggtggtggcagccccgagaatggagacggagcactgctcgccatcaccccacctgctgtgaaacgtcggagggggaggccccccaagaagaacaggtctccagcagatgctgggagaggtgtggatgaggcaccctcatccaccttgaagggaaaaaccaatggggctgacccagtccctgggcctgagaccctaattgttgcagatcctgtcctggaaccacagcttattcctgggccccagcctcttggaccccagccagttcacagacccaatcccctcctgtcacctgtggagaaaagaaggcgaggacgaccccctaaagcacgagatttgcccatccctgggaccatttcctctgcaggggatggcaactccgaaagtcggacacagccacccccacacccatcacccctaaccccactcccaccactgctagtttgtcccactgctactgttgccaacactgtcaccactgtcaccatttcaacgtccccacccaaacggaagaggggccgacctcccaagaatcctccatcacctcggcccagccagctccccgtcttggaccgtgacagcacttctgttctcgagagctgtggattggggaggcgacggcaaccccagggccaaggggagagtgagggtagttcctctgatgaggatggaagccgccccctcacccgcctggcccgccttcggcttgaagcagaaggaatgcgaggacggaagagtggagggtccatggtggtggctgtaattcaggatgacctggacttagcagatagcgggccaggcgggttggaattgacaccacctgtggtctcactaaccccaaaactgcgctcgacccggctgcgtccagggtctctagtccccccactagagactgagaagttgcctcgcaaacgagcaggggccccagttggtgggagtcctgggctggcaaagcggggccgcctacagcccccaagtcccctggggcctgagggttcagtagaggagtctgaggctgaagcctcaggtgaggaggaggaaggggatgggaccccacgccgacgtcctggcccccgccggcttgttgggaccaccaaccaaggggaccagcgcatcctgcgcagcagcgcccctccctccctggctggccctgctgttagtcacagaggccgcaaggccaagacgtgagtgggctgcccctccacctaggctttccaccgtggccactccctccatgaccaggcctgactctgttaaccactacttgaagtcttgagggggaaagcctccagggagacataggggccttctcccttcttcccaccaaagtagggggtaggcaactggttgtcatggaaatggggatcatcacagtccccttccccttcaccccacgtggctgggcagtgttaagggtggcaagatagtctctgtccccacccccttgtacttgattccccagctgtctttcacacagccccccacccttaggggaagggggaggggcttctctacaatgaggtttttttcttttttttttttttttaagaagaaaaaataataaacttagtttctgtatgagcatccgcgtaaggaggcttctgattttctggtctggtggagggttgggtgggaacttgggcatcgtttttctcctccctcttgttcttgcaaagatcctagcacctgatctctagcccaggactatatgttccaggcagaaatctacccaagaagagggaagattggtgaatttgatgtggtagggtgcctttccccagtcagtttgaagtcacagatatccttttcctctcatttcttttccctcggttcctagacgttcctcggagctctttgatgcctcagacctttcccttttatccctcttgctcaggtgcttcctttcacaactttttccagagggcaggcgtcctagctccagttgctccatcccttgggccctcccctggctcttcatctagccaaactggtttgagtcagccacaccccttcccagctccctgggctcttcacgtggtggctggccactcaaccccacccctgggcttggcttggagccctgagtcagctccatcaccacccaagccaaaccaaagctgaggcaggagccgaaactcagagtccttcaaggcctatagccaggtgatggaggacgaggagaaggcagtggagatcttgggcaacacggaagctgctcatcctccatcccccatccgctgctgctggctccgcctccgctgcttggcagctactagcattatctgtggctgctcttgcctgggagtcatggctctggtgtttgccatcaaggcggaagagcggcataaagcaggccggtccgaggaggcagtgcgctggggggcccgggcccggaaactcatcctggccagctttgctgtctggcttgctgtcctcattctgggtcccctgctgctgtggttgctctcctacgccatcgctcaggctgagtgaccctggatggcctctgctgagagccagccgagacctcctggatcctgcaatgcggcattgctaaggtcctgtgacagcagtggttggaaggatcctggttggaaggatggggactctctcaaggggctttggaagagctcttctagccctttataaaaggagggcagcagctgagactgatgagaggagggcagcctgctctgttctttcagggccccccacccccatctcccctaccctagcccaccctagggcctctacccagcgggaggggttgaagaccaggcctggttttattagaattcattttgtaataaaagccttttttagtggtg

SEQ ID NO: 112 - DNA, 544 bp, Homo sapiens
  misc_feature (1)..(544): n = a,c,t, or g
ccggtatccattggtagtttatttctttagggttctatcccaaccagtcgcttaaaaaccaagtaacacagacctgaggggtgggggctggggactgcacctccctcctactcatggtggacagcagtggggactagggaggggcaggagaggtggctgaagcaaggcagcagtaatggggccacgacgccacagagccagctccgtcctctcccagaccctggtgggagtccctgtggcttggggtggggagtgggggacccaacccaggcccctccctttcccttcctcagacagccttctttcgggctcaacccatttcttccggcaggagactgaggcacacagagaggaggaagtgggagaggaggacgagggaggggcagggtggcagcacaaatgaaggcagaggtgagaggcgtgggcaaggccactccacccccacacccaccccagagaggggcgaggaagccacaccatcacgcagcatgtcggngggacaaggcggggtttaaggctgaggggcccggggcaggcggngcct

SEQ ID NO: 113 - DNA, 508 bp, Homo sapiens
  misc_feature (1)..(508): n = a,c,t, or g
ctcggctttactgcagcctccgcttcctgggttcaagcgattctcctgcctcagcctcccgagtagctgggactacaggcgcgtgtgccacgccggctaatttttngtatttttagtagagatggagtttcaccatgttacccaggatggtctcaatatcctgagttcatgatccacccaccttggcctcccaaagtgctgggattacaggcgtgacacncacacccagccagttttcctattttctgaattcagaattgacttctctgggaaaactggagatgagaatctgcccagtgctctgctgtccagtcaccgccttttgaattttagttttgggcaccagggagtaccgttagctttccccttctttctggcccatttgactcatcagcacaataggggtcaacacctttaactttttaatttctaantttgttttattgtctttaggggtgtgtatggaaataaaacattgaacagggtttcttggaggccctcaaggtgt

SEQ ID NO: 114 - DNA, 982 bp, Homo sapiens
ttagattcatctttttaatgacatcctaaaattcagaggaggggccagcgggacctctgggctcagcggctgtgaaggagggacccgcaacacccgctaaggcaggtaattgcaagaaggcactcgcgagggggacttcaagcccctcttctatttcttcatataaaatcagggggatggggaaagctccaagggcgagggaagcagagagagtttctctcccagcctatggaataaggaagaggtgaggaaggggcgggtgctgggagcaagaaactgccaagtccaggacctgccctcacacagacacacacagcccgcacctgccctccctctaaaatctgcatccggggctgtaaggaagccccgtgttcaagcccccatctcttctcccttctagctggtacgaattggtaatcgccactctgggtgatgtagcgaacccagggcagggcctggtaaccacttttctcaatgatcttcatgtatcggacctggatcccagagacggtgaagtaggggatctcaaacttgaccccgatggggggccggcctccacctcttccttttccacactggggaggccaaagtgggctcgcatcaagtactccttgccccccggaaagacttaaatactcaaatcacgacgtttctctgcggcacatacttggcgctgcccacactggtcttgaatctgggggagtcggcatcgctgggtacaggcacagattatctcacaccgttggccactgactgtttactaaactgccccttgccttgaccatgaatcccacgcggctgtgggagaactttcaatgacagaatcaatccaattagttggcttagctgggtgctggggcggtatgacatgagcccaaattcacctcaggcgggaagaaaggatagggtgcgtcgttatcaagcagaagaacccgacggcctggtggaatttttaatcttcaactcttaatgatttgttttt

SEQ ID NO: 115 - DNA, 477 bp, Homo sapiens
ttccagagccacattttattccaggatgcgacacggggcggcggatgcctggcctcggaaaccccctccctgcctatgagggcttgtccagggctcccctggaacacagctcagccaggcaaggctgggagagggctgggccccccaggtgacctgcagacgcctcccccacctacatgccccacgcaaggggagccctggagcccggcctgccttgacaggaaggagataggtgaaaaataaatacacggctgggccgcctgcagcaagcgcgacagtgcccgggacccccagggccactcctgcctctggtggcctcaccgcggcccaggccctcgtccccaagggttcagacaccactgtcggcgagcaccgtgctgggcgcagaggccacgtgtggtgggacggcagcctgctggcccctccaggtgaggaccaggagcacaggctgtggcaactccagcccgggcaggggcc

SEQ ID NO: 116 - DNA, 555 bp, Homo sapiens
  misc_feature (1)..(555): n = a,c,t, or g
tgctaagcacggaggctgtttataggctgggccgcatattacaatgctcagggctccactgcaccctctcgggggtctgctagcgctttccgtagactgtctccacgccctccccactcccagccagtccacatcctctccggagggactgcagcaaggatcgttaagtctgtccaccgggatgggggaagaccagggccggagcagattggccatccttcagaagatcgacttccgctattggggagagtctgaggagtccgttctcccacggggcctcgtcactctttgcgaagggcgcctggcaggtcaaatgacctccatttccacctcgccttccaccttcttcttttgcttctccatcactgcctccagctctgacactttctctttgtcctccagcagcgagcgctgcacggtgacctggctgtacacacgtgcccnctnctcggggctcaccgcccgcagcttctccctctgcagcgagaaaagctgcgcnccggtcagcacacccagcgcgtccacggtcccggagctaaagcccttggcctgcag

SEQ ID NO: 117 - DNA, 510 bp, Homo sapiens
  misc_feature (1)..(510): n = a,c,t, or g
tactctnnataccccttctttattaataaattttaggtttagctcaatcatttaccggaaaagagagtttgagaatgttcgagaatctctaccactcggtaaccatgctggctgttatatcagaaaaatccataaacatacacagcagcgagctgttttcacaagacttcctgctaataaacacaacactttctcctccactcagatgggagcctcagatgccaaaacgcagatgtgccaactaactataggctcgttgctaagcagagaaacctatcaagtttgtccagcaaattcgattgtacagtgggatggcgtctgctctgcggccttggacagggagccactggtctgtgctgctgtcccctgaggcaggtcgaagctggtggcccttagagggcaggtaaaatggttctcatgggttagaacataagggctttgagaaaaaatgcaaaaggtctcattgaaattggaggcctatgtgaatctgtttacatggaggcataactg

SEQ ID NO: 118 - DNA, 567 bp, Homo sapiens
aatttataaaatatcctttatttattctaaggaacagtcaagcagtagctttaaaaaaaaaaaaaagacacattttttgaaagatattcttagtgttgtgacctggcattgggcccctgtgagcgggacggtggctgagaccgcctgctgtggctttgcgagttctctgcactcactggcaggggtttggtgggaaacggggaagctttggcatggttctgtccagttgcttataatcaagaataatgagttttgaggtttacaaagagcagaagtaacatttatacggctggcatttgacaaaagattgctgataatatactcattccaggaagtgtaaaaatgctttaaaggaatgataatttgtacttactgtttatggggactagatatattagaattatagcatcattatggggacatagtgtttccctataaattcagaaattctctggttgatgtaaaatcatacttcctggttttacttaattagtaaagaaataaataaattagagtaccatttagtcaggtagagttcccctttttccctccttataataaatttat

SEQ ID NO: 119 - DNA, 1506 bp, Homo sapiens
ggtggagcgcacggggcgggcgcacggccatgtccgccgagggcgcggagccggggccggggtccgggtccgggcccgggccggggccactctgccccgaacacggccaggctctgagctggttctgcggctccgagcgacggcccgtgtgcgccgcctgcgcggggttgggcggtcgctgccgggggcaccgcatccgccgggcggaggagcgcgccgaggagctgcggaacaagattgtggaccagtgtgagaggctgcagttacagagtgctgccatcaccaagtatgtggcggacgtcctgccggggaagaatcaaagagcagtgagcatggccagtgcagcgagggaactggttatccagcggttgagtctggtgaggagtctttgcgagagcgaggagcagcggttactggaacaggtgcatggcgaagaggagcgggcccaccagagcatcctgacacagcgggtgcactgggccgaggcgctgcagaaacttgacaccatccgcactggcctggtgggcatgcttactcacctggatgacctccagctgattcagaaggagcaagagattttcgagaggaccgaagaagcagagggcattttggatccccaggagtcggaaatgttaaactttaatgagaagtgcactcggagcccactactgacccaactctgggcaacggcggttcttgggtctctctcaggcacagaggacatacggatcgatgagaggacagtcagccccttcctgcaattgtcagatgatcgaaagaccctgaccttcagcaccaagaagtcaaaggcctgtgcagatggcccggagcgcttcgaccactggcccaatgccctggctgccacctccttccagaatgggctccatgcctggatggtgaatgtccagaacagttgtgcctataaggtgggcgtggcttcaggccacctgccccgcaagggttctggcagtgactgccgtctgggccacaatgccttctcctgggtcttctctcgctatgatcaggagtttcgtttctcacacaatgggcagcacgagcccctggggctgctgcggggcccagcccagctgggtgtagtgctggacttgcaggttcaggagctgctcttctatgagccagcctccggcatagtgctctgtgcccatcatgtgtccttcccggggcccctcttcccagtctttgctgtggccgatcagaccatttctatcgtccgctgacctctggccacaggaagccaggtccaccgcccaccaccctttcaggccatgtttctactcagtgtgcttttcccaaatgatgtgtgtggtgtttctaagagaaacagggcccataaccagtgggcagctttaggagggatggggatctgtttcagatctaggcataacctgtaaatcacaggtgtccaaacttttggcttccctgggccacatttgaagaagaattttcttgggccacataaaataccctaacgatggctgatgagct

SEQ ID NO: 120 - DNA, 942 bp, Homo sapiens
cgtctttggttatgctagtatcagtcagatgcacttagagtgaagaaacactgtaattacagcacacagattgcaagtattgcgtaccaagtgatacaactcgaaatgcagttctcatcttcctgtttggagcaacatgattattttatcacgcatcagagccttcgtgcttggattatctggtatgttaacaattctagaaaacattcatgaattcacaaaaatacgttactatggcaggggaccattttgtacacatttaagtatataaaaatactaaaatattgtccttttataaccaaagtcacgggtatcttcaggtccagggaactagactaggtcatccgtgtacaatggactggtagttacagtcttaggttaaagtattctaatgaagtatgggaactaaatggctggttttctaagataagatatgggatatgggtcatataacttttatattttcatgaagttgatttgtctggtgtgtcatttaaatggtatcattgaagatgtattttagaccaaaggaattaaattttatatttgtcaaacaagcaacacacaaacacacaaaaaacttttctgacgacgtagagcctcgtgaagaatttacaaaccatctggttggcgcccagagccctatgatgatatgacatgcggcacaaagtggaccaaagaaacctggaaaaaatagtgtgggttccccccaaaaaaaacccgcgcggggccaacaacctgttcttaacaaacccccagggggtcgctgagcgaacacgggggctaaaccagagccaggagcataatagacgacagagccagcatactgtctaacgaaaacaaactgaaacacagcaaacgacgaagacatccacgacagcagaaagcgcaaaagaaaaaaaaagacgagagaagacacaaagaacgacaagagcagcagaa

SEQ ID NO: 121 - DNA, 1335 bp, Homo sapiens
ggagagtgcggggggcggaggctggcagggggcgctggaagctggagcggtccgtgcgctccccgcgcccgagggtgcaggaggctctgaagcggctgctgcaccgcggggcccaggcggcggctggggggctggggggcgctgccgccgccgccgccgggggcgtcgctggcctcggcccctttgttctcgcgcgctccccctcgccgcccactcccctgctgtcgcgcggcggcggcggtggcggcggcggctcctcccgcccgaggcagtcgggctcggcgccgggggcgggagggggcggggggagcacgccagccgccgagagtggggggcgatggcgaagctccgggtggcttacgagtacacggaagccgaggacaagagcatccggctcggcttgtttctcatcatctccggcgtcgtgtcgctcttcatcttcggcttctgctggctgagtcccgcgctgcaggatctgcaagccacggaggccaattgcacggtgctgtcggtgcagcagatcggcgaggtgttcgagtgcaccttcacctgtggcgccgactgcaggggcacctcgcagtacccctgcgtccaggtctacgtgaacaactctgagtccaactctagggcgctgctgcacagcgacgagcaccagctcctgaccaaccccaagtgctcctatatccctccctgtaagagagaaaatcagaagaatttggaaagtgtcatgaattggcaacagtactggaaagatgagattggttcccagccatttacttgctattttaatcaacatcaaagaccagatgatgtgcttctgcatcgcactcatgatgagattgtcctcctgcattgcttcctctggcccctggtgacatttgtggtgggcgttctcattgtggtcctgaccatctgtgccaagagcttggcgatcaaggcggaagccatgaagaagcgcaagttctcttaaaggggaaggaggcttgtagaaagcaaagtacagaagctgtactcatcggcacgcgtccacctgcggaacctgtgtttcctggcgcaggagatggacagggccacgacagggctctgagaggctcatccctcagtggcaacagaaacaggcacaactggaagacttggaacctcaaagcttgtattccatctgctgtagcaatggctaaagggtcaagatcttagctgtatggagtaactatttcagaaaaccctataagaagttcattttctttcaaaagtaacagtatattatttgtacagtgtagtatacaaaccattatgatttatgctacttaaaaatattaaaatagagtggtctgtgtt

SEQ ID NO: 122 - DNA, 554 bp, Homo sapiens
  misc_feature (1)..(554): n = a,c,t, or g
aacttgacatttgctttatcctatataatacaaacataacaaaatacatttaaaatgttgttgaaatatacaaaaatttaatgtaatttttgcgtctgagatgtttaaataagaaacttctttaatcaggtatccctttggactgcaagagcagtttatatcatagctttgcagcataatctttttactctcaggctcttcaagcatttttatcttctttgaaacttctatctaaacaaaaatagtattaaaaaagataacagaaggggttagattctgccaatgaactgtggacatcagtatctcattcttctatttgcctccttattctagtttgaaaaagctttggaacacattattacctatcattattacatatttcttgtagctttagtggttactcccccgactggaaatagaagttgctctttaataagggcccaggggtgcctagggagcaatgcgaggattttttccctacatcncctggggccaaccctataccactaattctggggaaggggatggttataatacaccggccctggaaaggt

SEQ ID NO: 123 - DNA, 943 bp, Homo sapiens
ggcggcggcggcggcactcttgggcgcggtgcgtggtgactgagctacgagcctggcggcgggtgtgcgccgagccccggcccggcccgaccctcgcgtgcctcccaggctccgcacccctgatgctgcgcgggtgctgagccccttcggccgggacgatggtgaagtatttcctgggccagagcgtgctccggagttcctgggaccaagtgttcgccgccttctggcagcggtacccgaatccctatagcaaacatgtcttgacggaagacatagtacaccgggaggtgacccctgaccagaaactgctgtcccggcgactcctgaccaagaccaacaggatgccacgctgggccgagcgactatttcctgccaatgttgctcactcggtgtacgtcctggaggactctattgtggacccacagaatcagaccatgactaccttcacctggaacatcaaccacgcccggctgatggtggtggaggaacgatgtgtttactgtgtgaactctgacaacagtggctggactgaaatccgccgggaagcctgggtctcctctagcttatttggtgtctccagagctgtccaggaatttggtcttgcccggttcaaaagcaacgtgaccaagactatgaagggttttgaatatatcttggctaagctgcaaggcgaggccccttccaaaacacttgttgagacagccaaggaagccaaggagaaggcaaaggagacggcactggcagctacagagaaggccaaggacctcgccagcaaggcggccaccaagaagcagcagcagcagcaacagtttgtgtagccagtctaccaccaccacagcaccccagacagctaggcttagcccctctgccctcccttcattgtactttatcattaaaaatcaacttccagccctgaaaaaaaaaaaaaaaaaaaaaaaaaaaa

SEQ ID NO: 124 - DNA, 1244 bp, Homo sapiens
cagagggtgttagggctgtgtcgtgatgatcactatcatggagtcatttcttgtagggaatagttagagggtaagatcagagataggtacttagttcaagaagactctctgaagctcccaaactgtagatatgtcctgtgtgcgaactggctggctttacagaagtcctgatggaagtgggtttattgttttttgactcgttaccaaccctctgcttactccttcccctcaaaaaagggaagctgacttctcaggttagccagcagctcactcatacttttttctctctctattccattggctgatctgctgacttggggctctgaatctggatactctccatcaccggttggctgctgtcaccatttccttcctcgttgatggcactactagtggtcaagcagaggatgcagatgtacaactcaccataccaccgggtgacagactgtgtacgggcagtgtggcaaaatgaaggggccggggccttttaccgcagctacaccacccagctgaccatgaacgttcctttccaagccattcacttcatgacctatgaattcctgcaggagcactttaacccccagagacggtacaacccaagctcccacgtcctctctggagcttgcgcaggagctgtagctgccgcagccacaaccccactggacgtttgcaaaacactgctcaacacccaggagtccttggctttgaactcacacattacaggacatatcacaggcatggctagtgccttcaggacggtatatcaagtaggtggggtgaccgcctatttccgaggggtgcaggccagagtaatttaccagatcccctccacagccatcgcatggtctgtgtatgagttcttcaaatacctaatcactaaaaggcaagaagagtggagggctggcaagtgaagtagcactgaacgaagccaggggttcagatgacactgctgcatcctggtcacattctctgtctcctggaatgctcccacctcaagtggagttagaaggaaggtagaggggctctcccccaggattttggtgttttgactaacaccagttcctgccaacctctgttgccaccacctttccttccaggccctaagcacgtgcagcaaagcacaccacagcacctttgataacctctctccatcctgggcctgatgacctgctctagactgttatagagggataagcagctcattcccctggttcctaataaaaagcctttaaattaaaaaaaaa

SEQ ID NO: 125 - DNA, 5142 bp, Homo sapiens
gaattcggccgagaggacgagggggagggccagagctgcgcgtgctgctttgcccgagcccgagcccgagcccgagcccgagcccgagcccgagcccgagcccgaacgcaagcctgggagcgcggagcccggctagggactcctcctatttatggagcaggcacccaacatggctgagccccggggccccgtagaccatggagtccagattcgcttcatcacagagccagtgagtggtgcagagatgggcactctacgtcgaggtggacgacgcccagctaaggatgcaagagccagtacctacggggttgctgtgcgtgtgcagggaatcgctgggcagccctttgtggtgctcaacagtggggagaaaggcggtgactcctttggggtccaaatcaagggggccaatgaccaaggggcctcaggagctctgagctcagatttggaactccctgagaacccctactctcaggtcaagggatttcctgccccctcgcagagcagcacatctgatgaggagcctggggcctactggaatggaaagctactccgttcccactcccaggcctcactggcaggccctggcccagtggatcctagtaacagaagcaacagcatgctggagctagccccgaaagtggcttccccaggtagcaccattgacactgctcccctgtcttcagtggactcactcatcaacaagtttgacagtcaacttggaggccaggcccggggtcggactggccgccgaacacggatgctaccccctgaacagcgcaaacggagcaagagcctggacagccgcctcccacgggacacctttgaggaacgggagcgccagtccaccaaccactggacctctagcacaaaatatgacaaccatgtgggcacttcgaagcagccagcccagagccagaacctgagtcctctcagtggctttagccgttctcgtcagactcaggactgggtccttcagagttttgaggagccgcggaggagtgcacaggaccccaccatgctgcagttcaaatcaactccagacctccttcgagaccagcaggaggcagccccaccaggcagtgtggaccatatgaaggccaccatctatggcatcctgagggagggaagctcagaaagtgaaacctctgtgaggaggaaggttagtttggtgctggagaagatgcagcctctagtgatggtttcttctggttctactaaggccgtggcagggcagggtgagcttacccgaaaagtggaggagctacagcgaaagctggatgaagaggtgaagaagcggcagaagctagagccatcccaagttgggctggagcggcagctggaggagaaaacagaagagtgcagccgactgcaggagctgctggagaggaggaagggggaggcccagcagagcaacaaggagctccagaacatgaagcgcctcttggaccagggtgaagatttacgacatgggctggagacccaggtgatggagctgcagaacaagctgaaacatgtccagggtcctgagcctgctaaggaggtgttactgaaggacctgttagagacccgggaacttctggaagaggtcttggaggggaaacagcgagtagaggagcagctgaggctgcgggagcgggagttgacagccctgaagggggccctgaaagaggaggtagcctcccgtgaccaggaggtggaacatgtccggcagcagtaccagcgagacacagagcagctccgcaggagcatgcaagatgcaacccaggaccatgcagtgctggaggccgagaggcagaagatgtcagcccttgtgcgagggctgcagagggagctggaggagacttcagaggagacagggcattggcagagtatgttccagaagaacaaggaggatcttagagccaccaagcaggaactcctgcagctgcgaatggagaaggaggagatggaagaggagcttggagagaagatagaggtcttgcagagggaattagagcaggcccgagctagtgctggagatactcgccaggttgaggtgctcaagaaggagctgctccggacacaggaggagcttaaggaactgcaggcagaacggcagagccaggaggtggctgggcgacaccgggaccgggagttggagaagcagctggcggtcctgagggtcgaggctgatcgaggtcgggagctggaagaacagaacctccagctacaaaagaccctccagcaactgcgacaggactgtgaagaggcttccaaggctaagatggtggccgaggcagaggcaacagtgctggggcagcggcgggccgcagtggagacgacgcttcgggagacccaggaggaaaatgacgaattccgccggcgcatcctgggtttggagcagcagctgaaggagactcgaggtctggtggatggtggggaagcggtggaggcacgactacgggacaagctgcagcggctggaggcagagaaacagcagctggaggaggccctgaatgcgtcccaggaagaggaggggagtctggcagcagccaagcgggcactggaggcacgcctagaggaggctcagcgggggctggcccgcctggggcaggagcagcagacactgaaccgggccctggaggaggaagggaagcagcgggaggtgctccggcgaggcaaggctgagctggaggagcagaagcgtttgctggacaggactgtggaccgactgaacaaggagttggagaagatcggggaggactctaagcaagccctgcagcagctccaggcccagctggaggattataaggaaaaggcccggcgggaggtggcagatgcccagcgccaggccaaggattgggccagtgaggctgagaagacctctggaggactgagccgacttcaggatgagatccagaggctgcggcaggccctgcaggcatcccaggctgagcgggacacagcccggctggacaaagagctactggcccagcgactgcaggggctggagcaagaggcagagaacaagaagcgttcccaggacgacagggcccggcagctgaagggtctcgaggaaaaagtctcacggctggaaacagagttagatgaggagaagaacaccgtggagctgctaacagatcgggtgaatcgtggccgggaccaggtggatcagctgaggacagagctcatgcaggaaaggtctgctcggcaggacctggagtgtgacaaaatctccttggagagacagaacaaggacctgaagacccggttggccagctcagaaggcttccagaagcctagtgccagcctctctcagcttgagtcccagaatcagttgttgcaggagcggctacaggctgaagagagggagaagacagttctgcagtctaccaatcgaaaactggagcggaaagttaaagaactatccatccagattgaagacgagcggcagcatgtcaatgaccagaaagaccagctaagcctgagggtgaaggctttgaagcgtcaggtggatgaagcagaagaggaaattgagcgactggacggcctgaggaagaaggcccagcgtgaggtggaggagcagcatgaggtcaatgaacagctccaggcccggatcaagtctctggagaaggactcctggcgcaaagcttcccgctcagctgctgagtcagctctcaaaaacgaagggctgagctcagatgaggaattcgacagtgtctacgatccctcgtccattgcatcactgcttacggagagcaacctacagaccagctcctgttagctcgtggtcctcaaggactcagaaaccaggctcgaggcctatcccagcaagtgctgctctgctctgcccaccctgggttctgcattcctatgggtgacccaattattcagacctaagacagggaggggtcagagtgatggtgataaaaaaaaaaaaatcatcagcaataagctgatagatggactttccactgtaggagtggacgtttcaagccaactgagccttttcctcaagtgccgacacctccctcatctctcttatagtggaaggatggtcagcattaggctgatggggactgagaaggataggaagggatagaaattgccatgtgtataaagctttattctttagcccttaaccctaaggctcagggaaataccctatgttattgtgctccctggattcctgcaactcattttccttccactctggagcagggtgaggggaatgttatgggtaacagacatgcaggcatggctctacccatttctttgcacaagtatggggcccatgtggtagtccccatacccctccagttcctatatttttgtcttcttcctttcccctctttgccattcctaccttgcatttttcctgtcagtgccttagccaaggcaaggagataaggatgctcttcttgctttttatatctgcacattcatacctctccaaagaccagcttttccccagccagggccctcagccttccctgctgccccagtgattgattgagagagctgttggggtttctctgccaatgacccctgggagagggactttggtagggtcatgataaagtggcgggggtcttggtcctgctcagggttttcatccttcctcctctccctcctctgtgactgtggatatggttataaggtggttgcacctgggagccctgacaactggctgcacaaattccaaaagtaaaggtgtcagtccctgtggccttccttggggcttctctgaccacatgtgcccaacttcaataagagaaccaagggaccttcattttctgaggtgcttggctctgattcagggctttgcaaggggttagaagctgactgtaaaaatgggaagaggcaacggaagacatttatttctcctttggattttggggagaaccaagccctggtagggaagaggtaagggggatgattcacctccatatttcctaagcaggttgtatagggagccggtggcaggaggaaggctgttttcacaaatgacttgtaatgtcgtgattaaaaaaattcctatattcttctgcaaatcaaacgttctttcccaatccaatccagccttggttttattttaaattaaatattaaaattacacatttatattgaaaaaaaaaaaaaaaaaaaaaaaaaaaaaaaaaa

SEQ ID NO: 126 - DNA, 424 bp, Homo sapiens
tttttcaggaggcagcatcagatttatttattcctactcaacatgacccgggaacacaggagcaactctgtacacttctagaaactcacagctagctccaaaacaatagaaattttaaactacaaaagatgagttgtattcagcaaatataaagggtaattttagactgtgtgaacgtttatcagactatttacagcacccgggagacgggttcagatctcgccggcctccttctcttctgacctccgtgaagccatcttcccgttggagctctcaagcctccagtccgggggccctcgctcgctccgcccgctctcccaggactcctctctggatgcccgctctctggagaacctgggaaatgggaaccagaggctcagtggaggctgctgccccccttctgctggccgctcaggcactgacg

SEQ ID NO: 127 - DNA, 2286 bp, Homo sapiens
ggaggcaaacgcacgcgggaagagctgctacccattccagggaccctgccgctgcccctctgaggggtctgcacctcctgggagcaggtgggtctctgggacgagggtccatggtggatggctctggagacgctcccgaggctgtgccgtccccctgctgcacaggtcggagggtcaccgcagaggctactcgggctggggctggggccgagggagcccgcactggagccccatgtggaacccaaggatgcagctgctctgctaacacggcagcccatccttcgagactgtgacctcgccacagtggccctcagccctccacctccggcgggggcgagggccacccacctccaagtctccagccatgacgacctccgcactccggcgccaggtgaagaacatcgtgcacaactactccgaggcagaaatcaaggtgcgcgaggccaccagcaatgacccctggggcccccctagttcgctcatgtccgagatcgctgacctgaccttcaacacagtggccttcaccgaagtcatgggcatgctgtggcggcggctcaatgacagcggcaagaactggcggcacgtgtacaaggctctaacattgctggactacctgctcaagacgggctccgagcgggtggcccaccagtgccgcgagaacctctacaccatccagacactcaaggacttccagtacatcgaccgcgacggcaaggaccagggcgtcaacgtgcgcgagaaggtcaagcaggtgatggccctgctcaaggatgaggagcggctgcggcaggagcgaacccacgccctcaagaccaaggagcgcatggcactggagggcatcggcattggcagtgggcagctgggcttcagccgccgctacggcgaggactacagccgctcccggggctccccgtcctcctacaactgcccggcctcagacgtcaggggaagaggaactgcagctgcagctggccctcgccatgagccgtgaggaggcagagaaggaggtgaggtcctggcagggtgatggctcccccatggccaatggtgcaggggccgtggtccaccatcagcgggacagagagcctgagagagaagagagaaaggaggaggagaagctaaaaaccagccaggttttaggccgaacacagaggccagtggatcctcctgggggccttctgcagacccctggtctccgatcccctcaggaaccgtcctgtcccgaagccagccctgggatccgactcccatgctctcctcctctgagccctggggcaggaccccagtgctgcctgctgggccccccaccacagacccctgggccctgaactctccccaccacaaactccccagcactggggctgacccttggggagcctccctggagacctccgacacacctggtggtgcctcgacctttgacccatttgccaaacctccagaatccacagagaccaaggaggggctggagcaggccctgccctctgggaagcccagcagccctgtggagctggacctgtttggagaccccagccccagttccaagcaaaatggcacgaaggagccagatgccctggacctgggcatactaggggaagcactaacccagccaagcaaagaggcccgagcttgccggactcccgagtccttcctgggtccctcagcttcctccttggtcaaccttgactcgttggtcaaggcaccccaggttgcaaagacccggaaccccttcctgacaggtctcagcgctccgtcccccaccaacccgttcggcgcgggcgagacgggcaggccgacgctaaaccagatgcgcaccggctcgccggcgctgggcctggcaggcgggcctgtgggggcgcccctgggctccatgacctacagcgcctctctgcccctcccgctcagcagcgtgccagctggcttgaccctccccgcctcggttagcgtcttcccgcaggccggagccttcgcaccgcagccgctgctgcccacgccgagctcagccgggccgcggcccccgcccccgcagaccggcaccaaccccttcctctgagccccgccccgtcccataccggcctgcgcctgcgccggacgctccgcggccccgcctccggacccggggctgggcggggcgccggtgctagtggaacgccgagccagtggcggctggtatcccgcggcggctctggaagctggacgcggaccacggcccgggagctagaaactgaacgcccgcataataaagactggaaccctcgttaaaaaaaaaaaaaaaaaaaaaaaaaa

SEQ ID NO: 128 - DNA, 1191 bp, Homo sapiens
cgaggcggcggcggcggcggcagctgcttgggcgcggtgcggtggtgactgagctacgagcctggcggcgggtgtgcgccgagccccggcccggcccggccctcgcgtgcctcccaggctccgcacccctgatgctgcgcgggtgctgagcccgcttcggccgggacgatggtgaagtatttcctgggccagagcgtgctccggagttcctgggaccaagtgttcgccgccttctggcagcggtacccgaatccctatagcaaacatgtcttgacggaagacatagtacaccgggaggtgacccctgaccagaaactgctgtcccggcgactcctgaccaagaccaacaggatgccacgctgggccgagcgactatttcctgccaatgttgctcactcggtgtacgtcctggaggactctattgtggacccacagaatcagaccatgactaccttcacctggaacatcaaccacgcccggctgatggtggtggaggaacgatgtgtttactgtgtgaactctgacaacagtggctggactgaaatccgccgggaagcctgggtctcctctagcttatttggtgtctccagaactgtccaggaatttggtcttgcccggttcaaaagcaacgtgaccaagactatgaagggttttgaatatatcttggctaagctgcaagccaaggaagccaaggagaaggcaaaggagacggcactggcagctacagagaaggccaaggacctcgccagcaaggcggccaccaagaagcagcagcagcagcaacagtttgtgtagccagtctaccaccaccacagcaccccagacagctaggcttagcccctctgccctcccttcattgtactttatcattaaaaatcaacttccagccctgtctgctgtctacgtggtgggttgtggggatgcagtttggcatctgcagtacaccaagcacatgattcatgtctgagccaggtctgcttattctcccattgggcagctgaggaccgaggcacagaggtgcggtgacttgcccggggctccaggtagcctgcaggttaactggcggtaagtgctagactgtaagcccgacaagggcagggcttttggttttgttctctgatgtgtctcagtatctagcacataatagacactcaataaatacttgttgaattcaaaaaaaaaaaaaaaaaa

SEQ ID NO: 129 - DNA, 1853 bp, Homo sapiens
tgtgtctctcccgaccatggagggggtcgcggtggtgacggcgggcagcgtaggcgctgccaaaaccgagggagctgcagccttgccgcctccgcctccgcctcctgtctccccgcccgccctcacccctgcacccgcagcgggtgaggagggaccggcgcctctgtctgagacgggggctcccggctgctccggctcccggccccctgagctggagccggagcgcagcctgggccgcttcagaggccgcttcgaggacgaggacgaggagttggaagaagaagaggagctggaggaggaagaagaggaggaggaggaggacatgagtcacttctcgttgaggctggagggaggccggcaggactcggaggacgaggaggagcgcctgattaatctctctgagctgaccccatacatcttgtgttccatttgcaaaggttacttaatagatgcaactaccatcacagaatgtcttcataccttttgtaaaagctgcatcgtaagacatttttactacagcaacagatgtccaaaatgcaatatagtagtacatcagacacaacctctttataacataaggttggaccgacagttacaagacatagtgtacaaattagtgatcaatctagaggaaagagaaaaaaagcaaatgcatgatttctataaagaaagaggtctagaagtacctaaacctgctgttccacagccagtcccttcaagcaaaggaagatctaaaaaagtcctagaatcagtgtttcgtattccacctgaacttgatatgtctttattactggagttcattggtgctaatgaaggcacgggacattttaagccattggaaaagaagtttgttcgagtttcaggagaagcaactattggacatgtagaaaaattcctcagaagaaaaatgggtcttgatccagcttgtcaggtagatataatctgtggtgatcacctgttggagcagtatcaaactctaagggaaatccgacgtgcaataggtgatgcagcaatgcaggatggtctgcttgtccttcattatggtcttgtggtttctcctctgaagataacttgaagattctaggcacattatgaggagggaaacaaaggaggcttctgcaggactgcatctcaccaaagatttccatgaaatgtaattgctaccactttgctgttcaagacataacttacctatttttagcaccaagaattatagcgtttataagtacaacttggaacgatggaatgcatctgttactagagactgtatataaaaagcagccaaagctcaggggaaatttttcaaaaattgaattttaaaatttcttatgattttaaataccttgacattgattttgcttcccatctttgaagtaattggttagttttctttgttcagccatttcaagttggtggttgggatatctgctctctgggatggcatcagttgggcagtcatctttttggaagagaagtgtgcttttgagtggaagattcaaagccagtctttgttaaactgcagggtgtactctcaaagaccaaaactattggccacttttgtatgttgccagcatattttgaacttgtacctttttttatactagcaacactacaaaggagaagttactcatttcaaaatggatgaattgttattatgtgtgaagagactctgattttatgatctgtgccataaaatttcagtgtaataagacttcttcaatacatcttccaataaggggtgcttctttgtgacagtatttttatttctgacattcattttatttgggtacatagtgtggttgttgataccttgcaacagtattgcttctgaaagtaataaaaaattttaggag

SEQ ID NO: 130 - DNA, 805 bp, Homo sapiens
  misc_feature (1)..(805): n = a,c,t, or g
tggcgtctgggatgtactttattggacaagtggtggcccaagtcttggtctggaagcactggggccctggaccaggcactgagtttgaggaggcccagagttcagggctgtttggagcgaggccacaagcggctggtgagggagccaaggaagaggttctgcttgttggacttggagagctcggccaggcgctgctgctcctcctgctctagccggctttggcctgtttgaaagccgccagcgggtcatcctccagggcatagtgctccagcagggttcgcacgtcctccacaccattcagtgcaatggtcttgaggaaggcagacagatccaacaagacccggtcatcagagttgccgtcccagggccgcagggcaacgccgttatagggctgcaggcggaaggcttccttcttgcagtccacaactactactcgagctgggtcccgattcagacatgaaatatcctttacatggtgtccatccatgtatcttgtggcgtcccggaataggcggtaggagatgaagccatgggggtccacactatcaatgagtggaaacgcagtcatgccagtctctgacgtaaagatgacaatttcatataaaggggcagctgctggaacaggtctcgatgcctggcgcttcttanacctccagcagtgccagcaaccactcaggatgcagaggacgcggtgagctcaaaacgagcgtgtagggtggcttgtagtacggttctgcagagggtctgggagaaggcaagggctggtgggctcgatgatcatctgtctcatatctttgaaaatatt

SEQ ID NO: 131 - DNA, 1070 bp, Homo sapiens
attaatctatttaatttttttttttcagtttgtattttttattttacaataaaaagtcaaaaaaaataagcaaaaagataaactggaaaataagayttacatctcatatatatggacaaaggaccaattacctccaaacataaacagctcctagaaattactgcaaagatcaacaacccagtagaaaaatgaatgaagttcccagaacagaaaacacaagtggcccttcaaaaaaatgaagagaggctcagcctcttatggtaagacaaagagacaggattttaaaaacctaggcctcttcctagagttcccttaaatatctaggccagatcatttttacttcctggcttagaccctgccaagggctgcccagctactcaggtgtttgtgtacttgtggactcaagtyatattgtcctgatcttctggctgagtacggttttctcctccagcaaagacaatttggaggatgtactaagcatgaagcgctacttcctggcccccatctctcttcgcacagtgttccatcatccagccatgaaagcacagctgagtgatccaagaggcagttccaattgttgactaacgtgtacctgcctatgtgagtgtgttctatgggaactcaggccttagaatggtttcaaagtagtggctttcaaaattactgtttgcctcttcaaacttcacacctaaggaaaatggaaacatgcagagcagggacacagaaggggcattagctggcgtggggtaggggcaagagctaattgtgaaggaagaaggcctgagatcacgtagccatgtcggagaacagctgtgctcgctgccctgcctctttgcgcgcatgttaggcagccccaggctccagctgcttgagtttctcttggagtgcccggagctggcttcgaccccagttaatgcggttctggaaaaaaaaaawatwtrcggscagctgcaggscatcccggaagcttgcttgagcttgaggtgactgttaggactwgggttccaaccmgttcagggggtctgaggggctaaaagrctcsgktctggggttaatgggccytkccctcc

SEQ ID NO: 132 - DNA, 840 bp, Homo sapiens
cgcgggccgcagggcatggaccttcaggccgccggggcccaggcgcagggggccgcggagccgtctcggggcccgccgctgcctagcgcgcggggggcgccccccagcccggaggctggctttgctacagctgaccactccggtcaggagagagagactgagaaggctatggatcgactagcccgtggaacacagagcattcctaatgacagtcctgcccggggtgagggcacccattctgaagaggaaggctttgccatggatgaggaggactctgatggagaactgaatacctgggagctgtcagaagggacaaactgtccacccaaggaacagcctggcgatctttttaatgaggactgggactcggagttgaaagcagatcaagggaatccatatgatgctgacgacatccaggagagcatttctcaagagcttaaaccttgggtgtgctgtgccccacaaggagacatgatctatgaccccagctggcaccatccgcctccactgataccctattattccaagatggtctttgaaacaggacagtttgacgatgctgaagattgagtgtggagctttctgccttgtaggtgggcgggcctccacgtcaagatctcttttcctgtcttggaggtgaaaagtcatatctgagaaaatgtttgcagtgacccctagtctggggtacacagaccagtgttccttattgacagtgttcaataaggccccgtcattctcgccagtctgttgttgttcttaatgggctcctccttgaaatgtgtgtgtgtttgtgtcaagaggagttgtgttctttgtaaataaaggttaaaaagagaaacc

SEQ ID NO: 133 - DNA, 1187 bp, Homo sapiens
cggacgcgtgggtcgacccacgcgtcgcgttgaaggacaccagctgcggaatttgcggctgtggcagatggaaatcatggcaggtccagaaagtgatgcgcaataccagttcacgtggtattaaaaaatatttcaactcttatactctcacaggtagaatgaactgtgtactggccacatatggaagcattgcattgatggtcttatatttcaacgttaagggtccaaaaaaactccagctgtgaaagcaacataaatggattttaaactggtctacggttcttaacctcatctgttaagttcccattgcctggagaagctaagtgccaagctcatcatgtgactacttcaattggtacaataaattatgaacctggaacaacaaaaaaacaacacaaaaaccaacaaacaccacaccaacacaaaaacaaagcaaaaaaaaaaaaacacacaacagcgggcgaacaaaacaagaactaccgcggggcgccccacacagaaaacgcacaccgaccctctccccaaaaagcaccccccaaaacacaaggacaccaccccaacaccacccaccccgaccagcaaccgcacacccacacacaaacaacgcgaacacgaaacaacccacaacaccaccacaaccacacgacaccaacacaaccacacaacaccacgagcgccaccacacaaaacgcgccgaaacacacacaccacacccccacaccccccccccacacgccccacaccacacacacacccaccagcaacaacacgcgcgcaaaaacaaaacgacaaacccaccaccagcgcgaccagacgaccaccgcccacccccggcccacccgacaagcaaacaccacaatcaaacccgaggcaggcaccagaaaaacaacacagacaaccccccacaaccaccacaaccactaccaccacgcgcagcacccaccaacacaacacgcacgagcgcccgcaagacaaagcgccacgagcccccagagcaacaagaggacggagagcagagaagacacgcgaagacaacaacaaacaaaagcgacaccgcaacacgagacgcaaccgcagacccaccgccgcgccaccgcagccgaaccagcagcgaacacagcgcagaaaccaacacacacaagcgaaagcccgcacacgcaggagaggagaagaggaaagcagaacaa

SEQ ID NO: 134 - DNA, 569 bp, Homo sapiens
ttttttgcaagatttaattcttcctttaatataaataaggcagcatgaaacaccaagagccccactgctttctgctttagaagcagctttggtgcagaaaagattcccgtttccccaccgagttctgttgtctctgtacacacaagaagccagaagatatttttttttcagtgaactttctcctggaagcaaaggagaagctatgggagatccaggcatggttttggcttctggaggctgttttttggttactggggtctcttcaaagcaaaacgggatcaggatgaagagggggaaaggcatgggccataaataaataaggaaatttgccccgattctacaaatgcatctgatggaatgaggagggtcaggctgtgagggattgggggtagctccaggctgctgttagggacacacttgagctggttcattccctggagtgccccgcaactgcgtctagggagaggcaggcccaagcacatgttcagtctaattccagctcacactggaaggcttcctataggtttggttgccctgatcacagccgagctgccccaccaggaattaac

SEQ ID NO: 135 - DNA, 596 bp, Homo sapiens
ttataaagacagctataaagacagcactttccgcacacaaagtgtattttacaaaccttttttatacaaattaatgagctctactttatttaagtgttcatggaatgatgtaaattttaggtccagttgaacaaatattgagtgcctatcatatgcaagactaactccttactaggaatgaaatcacacagtgtcttctgtttgcagtatgtgaactttatgtttgaaaagaaattattatatttaaatttttttgttgtcagagtttatcattgtatactgtaacccagtaaattttgcattcagttttaaaaaatgaagatgtaacttacctgagtctcatttttgaaaatgaaattctgcaaaaattatttaaaaattagttcttggggaaattgattttcaagattcaagtgtataaaaacttatattgaacttttcagcctcgtttttaattagctgatgttaatgataagatacataatacatgtatcttgttgctgaaaatattttttgcatttcaacacattgagttaaaataaagttgttactacttattcaagattaaaaaaaagaaagaaaaaaataaaaaaaga

SEQ ID NO: 136 - DNA, 583 bp, Homo sapiens
  misc_feature (1)..(583): n = a,c,t, or g
cacgaggcgcaaangactttttttttttttttttttttttcactagacaaaaatctatttttaattgtataaaattatacatataaaatacatagaatgtactaagaagatgagtaaaatctttgacaccagaagtggacagatcaggaaacaatttttctcaagttatttgggatcttactggttggtatttgagaaaaataataaatccaggaggtacgagggcaattcttcccacaactcacaccccttaatccacacgtcccagagaaaggagaaacaggagtgttgatgagtgccagcttataaatgtcaaacagacacacctggtgtgtctagctgtttttgcctttactccaacccgacgtgtttcatggaatacaaacatggggcttctaccccagctctcttctgattagtaagaaaaaaaaaatgatagggcctggagaattcaaggaagcccgtttcaagcactaataaaattgtagctggattccttacctcttacccaacatgatttcaaaagcaagaaagttgcctttcatcttgcccctatcaaatccaaaagagccaattatagcct

SEQ ID NO: 137 - DNA, 672 bp, Homo sapiens
  misc_feature (1)..(672): n = a,c,t, or g
gctggccggcgtcacgagaccacatccagcattgccagcctcatctgacggagccagagccgtccttcttctcacagcggcctcagcgtccccagagccgagccagggtgtgagtgcatgtgaacgttgagtacacatgagtgcgtgtatgcccccaggctgggtcagctcttctgtggattgcatggcgtgtgattaaaagcccatgtgttcccacacatccacatcatgggaaggctaatgtgtgcctccttggaactgggtgttggtgtccatggaacttcctctctgtatctcatgtcagtaggcgcagaaacgcctcatgatgaagattcttgagccccatttacaagacccctcacatccaatcctgtcctgtaacatccatcaaggatttccataggggtgactggtgcccacccaagactgcaccagtgcctgctcattgaagagagtaactgctggccaggcagaaagaatatgggctctgcaatgagacagacctggaggggactctaccgttgagcactagcagctggaggagtggggagttcatggctatcatggttgtgataatcgattgtggngatgaaatgtcattgtgtatggaacgcggngctcattgctgattggcaataaaatggcggctgccgttgcatcggcaaaagggga

SEQ ID NO: 138 - DNA, 615 bp, Homo sapiens
tttttttttttttttttttttttttttttttttttttttttttttttttactaacagtgtttttatttacaaataattgtttttattaggccatttggaaaaccactaacattttttattttagaaaacattaaataataaacaagatgttatacagtactttggataacttcttccatcagtttagtgcaatgtatcattggcatcgaaaagtaaaattttcatttattttcccctttcatcttcagctgtgcagttatatgaccataaaggaaatgaaccattaaaaatggatctacagccatatattctgccgttactcaaaggcttaatgatttattttccccctccagccctgcctttaccaggttaaatgacagaagaccttctattgtacctattgttcaaaaaatattactgttctgtggaacctgggagagtccaattgataagagaaactgaatcatactgatgaggtgaaggaaaggtctgccggtgtggggcagggcactctttctcagcagccaagataacttgtcacacacgaagcagagagaatgccccgatgaaaatctctctgaactgtgttccttgaaggatctcttaaaaaaaaaa

SEQ ID NO: 139 - DNA, 469 bp, Homo sapiens
gaaaagaaaatcccaaagcaaatttgtgctagggttctttgaacttggctcttttacctcatggttgaagatcttgaaagaagtatgtaggataccactgggtgatgtacttgtcaaggccctgaaaagtagcctaccatgccattctcccccactctcaagtagcacttttatgttatgggaatcaaggggtgggaggtatcattattcctggtagttatgggtttttaataaatatcattactgcaatatcagacttcaatcttgccagaacttcaaaaaacattattcaatttttgtcttacgaaacacttaaaaaaaaagactatcacttgagaattttctttgcaatttcctgtaaatgaaaacatttgttaaaaagttcatctatgaaaagttctcacatatcttaaaaaaaaaattcttctgtacacttgttcccataattatgttgaaattaatggaaaat

SEQ ID NO: 140 - DNA, 490 bp, Homo sapiens
  misc_feature (1)..(490): n = a,c,t, or g
ttttgctgatttaaacaaaaatatttactcttttcattagcaaaacattatttaaaatatatctatttctcccctctgaacatttaactaggaacactgggcaatttttgaaggtttagtgctgattgtttaatacaataaatatggctgtggagagcacacagcagcagtagcttacatacgtccacggataagaaatttactctcatctggttagtgtccagtccaccaaaggaaaggtttggcattcgtgtgcttttttttcgtgtaggaatcaattctgcttgattttcattcttggaagaaaaaataatcagctgatatcctcaaattttatgacatgatgcaaaggagcaaggggacaaagatgacctatggtcaaaaagctggactgggatcaggtctccaggcagatcttccttcttgcgaggtgagtctacaaagggctgcactagaagccaggagtgaggcattggggacacnggggtgg

SEQ ID NO: 141 - DNA, 730 bp, Homo sapiens
  misc_feature (1)..(730): n = a,c,t, or g
agccttaaagagatgaaataaattaagcagtagatccaggatgcaaaatcctcccaattcctgtgcatgtgctcttattgtaaggtgccaagaaaaactgatttaagttacagcccttgtttaaggggcactgtttcttgtttttgcactgaatcaagtctaaccccaacagccacatcctcctatacctagacatctcatctcaggaagtggtggtgggggtagtcagaaggaaaaataactggacatctttgtgtaaaccataatccacatgtgccgtaaatgatcttcactccttatccgagggcaaattcacaaggatccccaagatccacttttagaagccattctcatccagcagtgagaagcttccaggtaggacagaaaaaagatccagcttcagctgcacacctctgtccccttggatggggaactaagggaaaacgtctgttgtatcactgaagttttttgttttgtttttatacgtgtctgaataaaaatgccaaagttttaaaaaaaaaaaaaaaaaaaaaaaaaaaaacatgttcgccgcctcggcccagtcgactctagacttcgagcaagcttatgcatgcggccgcaattcgagctcacttggccaanttggccctatagtgagtcgtaatacaattcaattgcccgtcgtttttacaacgtcntggcttgggaaaacccttggcgtaacccaaatttaatcgcctttgcagaa

SEQ ID NO: 142 - DNA, 568 bp, Homo sapiens
  misc_feature (1)..(568): n = a,c,t, or g
agcttgtgaattattttactttcaaaaaatatgtaagttagaattgtaattctaaaggcactgtcgtttgcttacacattctaacatatttctaataagaaagtacctgctttcttaagagaaaaagggataagttaccaaaagcagcacgttctcctgggctcataccccggattcatccatgaggccacttccattgtaaagcttttagcatctcttgatttctcttcacactgaggcacaaaggcctgctacttataggcattacttcatttttccttatgaagggtactataccaacacagactttatagtatgtttaaaaatcccaactgcaagatacacaggatgctgtaggcctgatttcctgttgtagaacctncagccctgtgttgaatgaagaggtgcanatatatagacccttaagatcagaccacagcaggcattcangtggaggggatgaactccattcattccagctgtgcagtgggacatctgcgccctccgcatctncgctcattnctcatctgagccactcaagagggcngnnctgtagtgtcatctgaat

SEQ ID NO: 143 - DNA, 445 bp, Homo sapiens
  misc_feature (1)..(445): n = a,c,t, or g
tttgttgtttaaaagcaaggcatgcttgtcggatgactctgtaacagactaattggaattgttgaagctgctccctggttccactctggagagtaatctgggacatcttagtgttttgttttgtttttttccctcctcttttttttgggggggagtgtgtgtggggtttgttttttagtcttgtttttttaattcattaaccagtgncaanggttagcccttaaggggaaggaggacggattgattccacattccacttcctagatctagtttagaaaacatgttccccatctggtgctcttaggaaggagtatagtaaatgcctcatttaataacatactccntttttgaaaagttgccnttttctctccacccctgagtaagatccagtaatttgatggaacnccagaaagtggggtggaagccaatcntggccccgcccctt

SEQ ID NO: 144 - DNA, 701 bp, Homo sapiens
  misc_feature (1)..(701): n = a,c,t, or g
tttcagcaacctcggctgtatttattgatacaaggaagatcacccgagagtcagggacgtggcggcgaggggccctggaaatctccagataccaaagctggaagggcgtggagtcttctccagttctcctagtttacagatgttgtgacctaggcttacaatgggcctggggtctgaaagcgggacgtgggctgcgggggttaaagagccggtttggtggaggtcagcgccacagcgcgccgngccaggaagactttattctgcgcctccgtctgtctctgacgtttgagctcagagatgaggcgtccgtaggagttagccagagccacagtgtacgccatcaggatgctggagatcagcagaaggggcacagcaaaagcctgggtccccaggaagaagaggaaattctgggtggtctcagggaggctggaaatagactcagggatctgggcccanatggacgactgcccccggaatggaccacacagcttagaaggcgggatcaggaagatgctgtaaagcaggggaacgctggagatggccagacccaggagaaggaccaaggggaaaaagaaattcgccgcggaagcccggaaggtgcgggcagccgggggacaggtggagaaaaaggtaagctttctcaggtaaaaagcagcagggacttgaccgtgttaagccagggcagtaaggggccgaaaaaa

SEQ ID NO: 145 - DNA, 2098 bp, Homo sapiens
acagattgctagaactactttatgcatgaaaaaagtctgtttcactgatatgaaatgttaatgcactatttaatttttttctctttgttgcttcaaaatgaggttggtttaagataataataggacatctgcagataagtcatcctctacatgaaggtgacagactgttggcagtttcaaaataatcaagaagagaaatatccttagcaaagagatgactttggggatcatttgaggaatactaactctgttgcattaatgcttcaaaaaatcatcaaatgattcatgggggcctgattcgcatttgaaaaatgtctgaaattagagtctcatttgtttcaggaatgcagctacctgagttttttgtctcggcaaagtcacaaagcccatatactcacattgtgtgtctatacttgccaattaattctaaacttgtaggaaatatgccctctcttaaaggagaattttttttaaatctctgagaaatgagattctgagtttatttcagctaaaaggttgcaattcttctgaagatatctcaaatataaggttgaaagttaagtgttaataatttttgtgaatttatacacacctaaacgttaagtacacaaatattttatttgttttacaaataaggaataagtaatttataaattaagaagttacctataaaaataaaaagataacaaccctatcatatagcttatttttaaattacctgaaaaacgatattctacactgtttcctttttgactctgagttttcaaactgttacttctcccatatttctcaatccatttcactcagttgcacagtcttttaaaccctgtaattgtcataccaaagtttctttttaaaaaaaaattactttaaatgcttagtttattcaaagagcgatccaataatataaaaggaacatgtgttcaacacaataaaattttaaatggctctaaatcaagcacatcaagagtatacaagtcttaaaggctttttaatacatactcttttcccatctatgtaacccaacttgcacatttcagctgcatgtggtgaatatgcatcatatatttactttaagaggtaagattttacttgcaaaatacatgtgcaaattaggatccatcagttgatggaagagatggactctagaatattatttcttgtggttattactcctttacaaagcactttcgtctcacttgatcctcataaggaaactaaggctcagaatgagtagagctgggttcagaatctagctcttctaactccaagccatctcctctttccactgcaggaaactgcctcttttgtcagtgaaataatagaaagattgtgttagttaagtgataactgtcatttgtttgaaaatgttcgagactgaacaaatagcatttaaactgctggcatatagatgagatattgtacttttgtgcaatgtttattacctttgattaaattgtaatgtgaagcttttactaggtgaatagttcattatgtagtggaggcttcgtggttgtccattgaattgtcacagcaaaatctataagtttcttcaattctacaagatagatccatatacctttgatcacttggagactctttttttgctggtttctagataactcaggtaaatcagacctttacagagtacagggctaggtgaaagaattactgaaaaatcaccttgaaaatccgaagggctgatataccctttatgttcctgactgatgcgcagaacctgggggaaatctacagcaatatacaggttgcaatgctgataacacaacagcaatcctctcctctacgtggacttactgttgtttttttaattattattggaatgggattttagaaaatagaagttacctttgtgtgtgttttagggaaggtagagaagaatctgctctttctctgaatactgttttgaccccaggcaggaccttggaaaggccaaaacattaacagtagtacttctgttcactgaagagttatgttacatgaagataaaatggttttgtcgtgtttattaatgtattttgtgttgatataaataaacatggtaatgaaaccaatgaaaaaaaaaaaaaaaaaaaaaaaa

SEQ ID NO: 146 - DNA, 126259 bp, Homo sapiens
gaaaggagaaaggagccaaggagggagggaggttcccttaaagactctttcggaagtcacatacaatcttcttgttgatgttccattggctaaacttgatcacatcactacactaagctacaaaggaggctgagaaatatgatctgtgttctaggcaccatgtgtccagatgaaaattgaggctcttatttcaaagaaaaagttcagtccatggccaggcgtggtggctcatacctgtaatcccagcactttgggaggccgaggctagtggatcacctgaggtcaggagttcgagaccagcctgggtaacatggaaaaaccccgtctctactaaaaatacaaaaattagccgggtgtggtggcatgtgcctgtagtcccagctgctcaggaggctgaggcaggaaaattgcttgaatttgggaggcacaggttgcagtgagctgagatcacgccactgcactccagcctgggtgacagagcagaactctgtctcaaaaaaaaaagtatcagaaaaagcgcagtctggatattgggaaatgaccatcagtctatgcatgctcaggagttccatgtctagcagtgtgtcctataggtttgcttaacccatgtgacatttgacacgtttacaaggttattcactgcagcattgtgacagcaaaagactggaaacaacctaagtgtcctgtaataggggactggttaaacaaattatgggacatttatacaatggagaatgatggccacaaacacacatgaggaaactctcaatgcagtgatatgaaatggtatttaagatgtttcactttggaaaacagtttggcagtttcttatagagttaaacatacatctctcctatgacccagcaagttcacctctaggtttttgctcaaaataaaaatatatatgtatatatagctccacaaggacttctatgcaaatgttcaacagagtttaacatgtgatagacaacaattggaagtgacccaagatcgaacagccaatgaatggataaactggtgagtcaaatattacactggagtttaaatgagtgatccaatgtctgcaaccacatggatgaatctcaaaacatgctgaatgaaaacaagctggatacaaaaaatagcatgttgtaatgatgccgtttatatgaaattctagaagaggcaaaacagaccaatctatgatgacagaaagcagagcagtggctgcctctggggtggagggatggactgggaaggagcataaaagaatttcttgggatgctggaaatgttctgtatcatgattggggtgttgattacacaggtgcatttcactgcatgtaaattataccttgatatttttaaaaagcagggtgcagaacaatgtttaaattatggaatccggtatgtttaaaaagcaaggaaatttgcttgtatctgcattgactgtctagaagagacttgtaatagtgattgtcggtgggagaggaactgggtagctgggggctggggaaaagggacactttgggccataccctgttatacctgttgaatcttaaaccagttgaatgtactacctaattaaaaactaaaactgaaaagatcagttagatgcacacgtgacatcaccacattcatgttttaaatctcctaatggctcttcccggcaatctggacgaagttcagactctgagctgtcctggccttatgtggccccactcaggcagcatcctctccaaccacttttctgttccctgcagagacagctcagtgcctggctccctctggttggcctaagtgcatatgtgccattccctgagtgctcagctcctcggtgaattctccccagccccctgcctgagttggtccctcgggtctcactggacctgctgcactttgccttcccccttcctcatctatcagatcaacacgtgtttcccagagctctctgtgagctggaccccagagtcctggagatgtgtgggagccacttttatgggggaacctgcttccttgtttctgcttcagacagcaggcttctcctgccctgagactcccagcagcgtctcctcttcccaggcccagatctggcctggggtagaaactttgataaaatgtgctgtctttaagttaaatatggctccataaagaatgcattccatgacaagaaccaacagagccctggtttcttagaagatacagagaaaacacactgttgtgggagaattgtgtctgccaaaaagatacatcccagctctaaccctgggacctgtgattgtgaccttatttggaaacagggtttaggcagatgtagtcaggtcagggtgaggtaatactggattagagtgggctactccaatgactggtgcccttaaagagggaaacagacagaggagaacaccacgtgaccacagaggcgaagatgggagtgatgcatccacaagccaaagaaggccaaggaggcttgcagtcataaaagctggggagaagcgaggaagtgtcctcccttagggctttcagagagagcatggccttgccagcaccttgatttcagacttttagcctccagcactgtgagaatacatttcagttgtcttaacctacctggtttgtggttatttgttctttttttaaattttttatttatttatttatttttgagacagagtctcactctgtcacccaggctggagtgcaatggtgtgatcttggctcagtgtgacttccaccttctgagttcaagtgattctcctgcctcaggctctggagtagctgggattacaggcacctgccaccacacctggctaatttttgtattttcaatagagacgtggttccactgggttggccaggctggttttgaactcctggtctcaactgatccgcctgtcttggcctcccaaagtgctgagatcacaggcatgagctaccgcacctggcctgtggttgttaactgtagtcccaggaaatgaatacacacacaaaaccagttaatacctaagacaattccagctagtggcaagtgctttggaaaaacaaaacaaaacaaaacaaaacaaaacaggtgagaagggcgtgggatagagagggactgggaacggtgccacattagccagggtggtcagggaagccctcttggaggaggaggcatttcagtggagaggagaagcccagcatgtgaggaccaggcagaggtgctggtgagggggcacttggtgggcgtgaaagctactggatgcagctctgacgatggaggatacctgactgggattttggaggaagtctccaggaatgaaccgggaaggggctatcctctctttgcctctgcaggtctcagaacctgctgcatggctgctgcaggctgtccctcggcctaggccggctggcagccgatgaaggaggccagcctcgcagctgacatgctgctctctaattgtgattaactaccaagtcctctcctgctccggcctgaggccgctggtgtgacagctgcagagtgaatcaatgaggccaggaaggggttaatgggcagcccctccatctgagcccttcagacaataaggggaggtggggaggcctctggtgggggtgtgtggcatcagctggggtgagtgaatggaggggacagaggccttgtccctggggacagggtgtgagtgctctgtggggagaggggtcagacccccctcccattattttcatccacctccatcgtcctctcccctcccccacccagccagagcatcccagacaactgccctcttggctccaaagtgtgcagcatcttcagccttacggaattctgaagcagaaattctaaaagccaaagaactgcagaatcgtgacatgtcaccgctgtgggagagtccgtctagtcctgtcattctgaaactttcttttgcagtggaacccacaactcccaccccagctcatttccccccaaaataatagtgcattgataacattgagaacagaccctggtaccagccggcctcattcatccttcattcagccccggttctaccacgtacaactagggtaacttgggggtataatgcatagtttataggtgtgtgtgtgtgtgtgtgtgtgtgtgtcttccctagagacagagtcttgctatattgcccaggctggtcttgaactcctgggcacatgcagttctccagccttggccttctgagtggctggctcacaccaccgtattcagtagttccgtaggttttgacaagtttgtaagttatgtaaccaccaccacaattaatatatagaacatttccatcgctgaaaaatgttgcctcatgccccttgtagtcaatacccttccctgtgttacctgatatggtagcatgaataaaggtcatctagagttagtgactctaggccgggcagggtggctcatacctataatcccagcattttgggacgccaaggtgggtggatcacttgaggccaggagtttgagaccagcctagccaacatgacaaaaacccatctctactaaaaatacaaaaatgagccaggtgtggtgatgcacgcctataatcccagctactccggaggctgaggcaggagaattgcttgaacccaggagctggaagttgcagtgatccgagatcacatgactgcactccagcctgggcaacagcaaggctccgtctcaaaaaaataaaaaaaataaaaaaattagtgattctaatccttgaactgtgtaaatgttaccttatttggataaaggatctttgcagatgtaattaagaggcagaggttggagtgatgtggcccaaagcaaagaacaccaggaggctcccagaaccagaaggggcaaggaatggattctgctctagagcctccagaggtagagtggctctgccaacaccttgatttcaaatgcctggcttcagaactgaaagagaatacacttctgttgttttaagcctctcagtgtgtggtacttttttacagtagtctttacaaacaaatatacctagcaaccaccatgccttgttttctatctgtataagttttgcctttgcaaggatgttacatagacagaatcctgcagtatgaagcttttgtgagtttggcttctttcactcagcataacacagttgagatgcatccatgctgttgcatgcatcagaagtctgttccttttggatgctgagtagtatttcactgctggatacaccacagcttatccattcaccagttgaaaggcatttgggtcactcctaattgggagcattataaataatgctgctatgaacatgtgtgtatagatctctgtgtggacatacactgtcatttctccagagtagataccctggagtagaattactgggtcatattgtaagtgtatttataattttatcagaaattattacccgggcatggtggcatgcacctatagtgccagctacttgggaggctgaggcaggagaatcccttgaacccagtaggtggaggttgtagtgagccgagatcatgccactgcactccagcctgggcaacagagtaagactctgtctaaaaaaacccaaaaaaccaaagaacaaaactacaaagaatctgatgtggctcatgcctgtaatcccagcactttgggaggccgaggttggaggattgctggagctcaggagtctgagaccagcctgggcaacatggcaaaacccgatctccactaaaagtacaaaaattagttgggcgtgatggtgagtgcctgtagtcccaggtacttgggaggctggggtaggaggatcacttgagggtgggaggcggaggttgcagtgaggtgagattgtgccaatgcactctagcctgggtgacaaagtgagaccctgcctaaaaaaaaccccaaaaaacagaaagaaactgacaaactgttttccagtgtagctataccattttgcattctctccagcacttagtattgtcaggtttttaaaaatttagatattttaggccaggcgctgtggcttatgcctgtaatcccagcactttgggaggcagaggtgggcggatcacttgaggtcaggagttcgagacgagcttgaccaacagggagaaccagatacttgggaggttgaggcaggagaattgcttgaacctgggaggcagaggttgcagtgagctgagatcacaccattgcactccagccctccagcctgggcatcaagagtgaaactctgtctcaaaaaaaaaaaaaaattagatattttaataggtatgtaacaatcatagggttattgtgagaatgaaatgaacatatctgagaatactgcctagcacatggctcctggcttggaagggtaagctcctcttattgcaatcactatggggttatgtcctgtccaggacaaaaccagaggtgaaaactcaaaaaaaaactcaggtgggccaggaggaggctgtggggaccagtgagctcatgtcccatcttgaaggtcaaggtcccgggaagcagctcctgagatggaaatctgcatgtgggtggttttccaggtagtgctcttaggatcttggaggagccagggaagcaggctcgggcagttgcaatagaggccttgaccagtcccatcaggagctgggccagcccttaggacatgtcacagcctgagacagggaggtcatgcctctgtactctgcaagatcagactttggagtggttgcccacaggagagatgttattaatatcttgggtgaagcagcccttttaagctggtgccttgatccgggtgatggctttgaggtggaaaacaagcctgagtggtttcagctttcaacttttcaagagaagctatgtatctagattttgatgttaactctccaaacttttttaaaatgctggaaattctagacttttcaaacctgctgtgaggggctcacatgccaggcacaagggctggagggggcctgaggctgcctgtcgatgccccttgatataaaaccaggctgggtgcagtgccttatgcctgtaatcccagcacttcgggaggccgaggtgggtggatcacttgaggtcaggagttcgagaccagcatggccaaagtggtaaaaccccgtctctactaaaaaatacaaaataataataataataataataataataataataattagctgggtgtggtggctcacccctgtaatcccagctactcgggaggctgaagcaggagaattgcttgaacccgggaggcggaggttgcagtgagccgagatcgcgccattgcactccagcctgggcaacaagagcaaaactctgtctcaaaaacaaaacaaaacaaaaacaaaaacaaaaaaggaaaaccaaacaaaaaaacccccaaaacctgctgtgtcatctgacatcacgctagtgtctggttgccgcactggagaggacaccccatggggcaggaatctttgggttttgatctccaccacatccccagcatgtagggcagggtccaggcctggatgcagcacgagagaaggaacgcagggcccgaatgagtaatttgcctcagtgtgcaggtcatttaattgcaaagagaggaaaaacgacaaccaaaaacaaccaaatgaaaaaatgagcaaaggatttgaatagacatttctccaaagatgtacaagtggccaataaacagaggaaaagatgctcagcgtcagtaatcattagggagatgcaaatcagaattgcaagcacgagataccgcttcacacctattaggatgcctattaaaaaacaaaaacaaaaaacaaaacaaaacaaaaaaatcaggcagagtgctgtgactcacacctgtaatcccagcactttgagaggctgaggtgggcggatcacctgaggcagggagttcgagactagcctgaccaacatggagaaatcccgtctctactaaaagtacaaaattagccgggcgtggtggcgcctgcctgtaatcccagctactcgggaggctgaggcaggagaatcgcttgaacccaggaggtggaggttgcagtgagccgagaccacgccattgcactccagcctgagcaacaagagcgaaactccgtctcaaaaaaaaaaaaaaaaaaaaaaaaatcgcagatctgactgtgtgaccttgggcaagttgcttgacctctcagtgcctccatttcctcctctgtaacgtgagagtaaaaatactactcatacctacctcgtagggctgtcatgaggactgaataagtgcataggtacagacatgcttaggacagtatcagcacatgcaggaattacatgggagttggctgttaatattattacaggagtggatcaaatccatctctgccatggacttgctgtgtgacctagtgcaggtcactttgcctctcttggtccagttttctcacttgtaaaatgggaccatactgccactctccatagggcaagtgtgcggattcgaggagctcatatgtgaaaggcctccttcaggcgcaaggttggtccttggttatgcacgtatgtgagcctcttggcgtgccttcatatgtggggcataggcaagcactcaagtggcctggactcctatctcggctctcaatgtccccgcttcctggcctgggatcagcaggacctcagtggatccaccatccaggcacatccctttctttccctgcttttttcctgcttcttgggcggcaccaccacctactggcctaaagctacattgcagccaatgtgcacagcggggcggagggaagggaatatggccttgggcagctgctgtgcgcagaatatttacctctgtacacgcttagggtgctgaggcttagggagctcacacggagagagccagctgtgaagctggggttagaatccctgtctccctttcacctcactccaaacaccctcttagaatgggaactcagttcaggttctgccttgggccctagacgatccacccctcccttctgagcagggagccaggagctgaagtccagggtccttggaagtatgtcagggttgtccccccagggtcctgattacagaagaaagaacactggactcagagtccagaggttgggggtctagctttgccttccctatccccaactatcagcaaaacagcctttggaaaatcctcacccatttattctagcacttgtcatttcgaaatatatttactgtgggagagcatttaatgtgagtgttaggttctaacgcaaggagaaaattataaaaataaacaaaaacttttaaagaactcctaaaaatcctttaagtcactcataaagtataatatgggcagttttctaaatatagtcctttgcagcaataaatgcacggaccataaagaacagcagtatatggtggtgattgcatgcatttgcgaactgtaattttaggttctgttctctctcaggggtgtgtgggattccgagctgtggatccacacccccacatctctctcacagctgggatcatgtccaggcagaatcgcccacattgtgtacatcattctcccttctctctctctttctgagcgcacatagctgcatttccgaagttacataataaaaacagctaacatttattgagctttcattatgtattaggcctgctcgcagccctttgctcacgcattaattcattaattcagataatcctcctaagaatgttatgaggtaggtatattattatctcttctctttacagatgaggaaactgaggcactgaatggttaagtaactagcccaaggtcaaatagtgtaccacccagcccgaaggcgttcaccttgttcccgggtaggatcgcagaactggttaagctaggttaccgatccgggtggtgtcagctgatccctcagctgctgtagtgcaagatctgcaaaatatctcaagcactgatcttaggttttgcaatagtgacactgtccccaggaacaacttggggaggttcagacccttgctgtcagaggctgcacagcccctaaaccttgatttctaatcttgtagctaatttgttagtcttacaaaggcagactggtccccgggcaagaagtggatcttttcaggaaagggctattgtcataatttcctcagttacaatttttgcaaaggtggtttcaatagccagtgagtggtacagcctgaatttgaaggcaggaagtccgggacgagaacccacactcttgactggcatacttgccacctgaatggaggctccatagagccacgcgtgcatgcttgtgtacctgttgtcagcccgcaagctccgttaggcaggctagaacctgatccaggttaactttgcatccttagtgctggttctttccatccagggccccactcagggtatatgctcagtgactgttgtacaaatgcataaagctcagtttgcataaagctcacttcagcttctgtatctgtaagacaagaatcagagccaggcacagtggttcatgcctataatcacagaactttgggaggctgaggcgggcggatcacgaggtcaggagttccaggccagcctgtccaatatggtgaaaccccgtctgtagtaaaaatacaaaaattagccaggtgtggtggcacgcatctgtaatcccagatactcgggaggctgaggcagaagaatcacttgaacctgggaggcagagtttgcagtgagccgagatcatgccactgcactccagcctgggcgacagagcgagactccatctcaaaaaaaaaaaaaaaaaaagaatcgaaatcagctcttcagattgctggaggctccgacaagcccattggtgggaaaattctctttaaagacactgatgtgggctgggcacaatgactcatcctgtaatcccaacactttgggaggccaaggtggatggatcactagaggtcaggagtttgagaccagcctagccaacatggtgcaaccttgtctctactaaaaatacaaaaaattagccaggtgtggtgacatgaacccataatcccagctactcgggaggctgagatgggagaatcgcttgaacccaggaggcggaggttgcagtgagccaagattgcacatctgcactccagcctgggcgacagagcaagactccatctgaaaacaaacaaacaaacaaaacactgatatagtttggatttgtttcccctcccaaatctcaggtggggttgtaatccccagtgttggaaaaggggcctggtgggaggtgattggatcttgggggcaaacatcccccttgctgttcttgtgatagtgaatggattcttacgagatctgcttgtttaaaagtgtgtggcacctcctcctaccccgctccagccatgtagaacgtgcctgcctccccttcgccttctgccatgattgtaagtttcctgaggcctccccagtcatgcttcctgtacagcctgcagaaccgtgagccaattaaacttctttttttaaatgaattacccagtctcagttcattataccaatgtgagaacaaacgaatacagacactaaattctcctttgcccacctcctgcttggtcccttcttgaattttcaagctgctcaaccaagtggcctgcaccagcttgggagagctaatcgtgtgtatctgtacccaactctacattcagtaacatcatgtttgtagctcgaaatcagcaatggtgagtatttacactatggcaattggcaaatgcttcaaacaggagttttcccctctagagatgttaaacgtttgccaggaggaaatcaatcctctaatggccaccttcaaggaggcaacacagtggagtgatcatgcttgttggctctggagccagaacacctgggttcaaagtccagctctatcacttaccagctgtgtgaccttgttcagttacttaacctctctgagcctcattagtctcattcatgattacgtatttcattggggactcaatgccatcttccatataagtgctctctcaattaatgttatatattaatattatcaatcagcttaagaggtggggaaactttcttgttttccatcctaggaaagggagtgctgaggacaggacttgcagtgtcaaaaaggaacctcaaaaacggcaatgtgtaactgcaggtctgggccatttttgagggtctcttgagcattggcagaccagatctttatgccaacacaggttgtgcgtgtgggggttagaggaggagaggccttctcagttctttgcaggaaaggctactgttagctctagagcccagaacagatttagggggagagatgatctaaccaaactttccctctgccctcggcttgccagtcttctcgctagtgaacactcccagtgtgaggtagagggttccctgttccacctccttcctccctctgtagaggaggtatgcattggggcaggtgtgtgtaaggccctcctggggtacccctccagggaatcttcccatcttctccagtactgccccatctgacatcctgcctgaagccacaggtttcccttgcaatcactaaagaagcaggagggaaccagcagaactccctgcccatgtgcacaggaggtgatccagaaacttcaaggggaaaaatcctgctctccaccccagcaggcattgatttttggctgcgaagattacagtctctctctctctctctctctctctctctctctctctctctctcacacacacacacacacacacacacacacactcctgtgtgccaggaggttcctagaaggtcctcactcctcgcactcaggtgctccagggctagcccactcctgggaggtgcccacaactgaccacgatgcccacaagactgtgggaagggttgccccatgtgccttcgtgcccctcccactggatcccaacgaaggctcttttcacaacaggaatcagagcatgtcactcccaacctgcctaaaccctccaatggctcccaccacttttgatcaagacctaaatcctttctgagtccaccccatccttacagggtctaaccttgcttccatccctgtcttcaccccttattcctccctctgggctcctcttcaggcccttgaggtgccaagctcactcctgccctgggcctttgctgctgctgtccccttggcctggagcactcttccctgtcctttttgcccatgtgaggctgagaggcagacggaatcatggttgctagtgtagagaggccacactactggagtttgtatttcagttctgtcaccttgaactgggtgacctcacccatctctgcctccctttcctccctctatacagtgggaaagataatagcacctacatcttagggtgttgtgagactgattgagataatctgtatggtttttggcagtttctgaaatgcactgtaaactgtctggttctcctcccatcggaaggtgagaatctgactgctccccttgactctgggtgagagggtagggcaacagcaatgctccatgatttcagaggctgggtcataaaaacggtctgcaggggattcacttccagaacagtggagtgaggaacactgcagactgctttctggtgaaaacaactgatgatgatttctaaaaaacaatcatttgaagtctctggaaattgtcctaagagcatacagcaagtgaagaaacacttattcaagaaaatctactaaatctaggtaagaacagtgagtttgtagaacttgagacacaatccactctctttctcccctccattccattttactgttatggaaactcaactgtgagcagccagggccaagaagatgggagtcatttccccccaagctcctagtcgatggggtacagcatctccccaggaagggaaggctgccagcatttgtcatcctcccaacagctatatcttacagaggctaaactccaggtaggtgtggctgggagactgggatcttccttcctctacccagtccccactcatagggtggtggccacgccaagtgcagcaggctaaaaatattgaagccccagttgcttttgtcttagcttacttgttaaagcagaggttccatgcctggagatgcaagctgagaagaccagagactaagaatactgccccaactcagccctgctcataaagcaagaaggttactctgggagaagtgaactgttgtccctgcctccagctccagagcagtgtcacagatgctttgcccaagagagaggcaggtcataacaacacagatctttaaagttgtccataaaggaactgactttctttagaacagagtatgcagaaatttaagcctaagagtgccctcagaagcagtggcgattttggtagtgatcagggacccaaagttgctatactatatcatcttaaatgttcattttccagcaaagaatttcaagacttgcaaagaaataaacacatgtgacccatacacagggaaagaccagtcaacagaaactacctgtgagagtgctcagaggtcagacttgcacggacttcaaagcaaccactgtaaatatgttcaaagaaataatggaagccatgcttaaagaataagggaaggtaggctgggtgcagtggctcatgcctgtaatccccgcactttgggaggccaagaggggtggatcacctgaggtcaggaatttgagaccagcctggccaacatggtgaaaccccatctctactaaaaatacaaaaattagctgggcatggtggcaggtgcctgtagtcccagctactcgggaggctgaggcatgagaatcacttgaacccaggaggcggaggttgcagtgagctgagattgtgccactgcccttcagcctgggtgacagagagagactccatctcaaaaagaaaaacaaaaacgaaaatcaagaataagggaagcggtgatgactgtgtctcatgaacagagaatgtaaacaagaagatactattttaaaaaacttaatggaaattctggagttgaaaagtgcaaaagaaaaattcactagaggggctcaacagtagacttgagccagcagaaggaagattcagtgaatctgaagacagatcaatagagatttcgcagtctgaagaacagagagaaaaatatgaagaaaaatgaacaaagccttggagaaatgtgggacacagctaggtgcaccaacatatgcacaataacatatataacagaaggagagcaaagagagaaaggaacagaaaaaaatgtgcaaaaataatcactgaagcctttgcaaatttgatgagaaacatgaattatgcattgaagaagcttaatgaactccgagtagaacaaatgcaaagtggtcaacaaccagatacataaaaggaaaatgttgaaacccaaagataaaaagaaaatcttgaaagcaacaagagaaacacagctcatcacatataagggaacaccaaataagaccgacagcagatttctcatgtgaaacgatggaggccctaaggcagtgggacaacatattcaaaatgcataaacaaaaactaccaagcaagaatcttacatccagcaaaattatctttcaaaagtgatgatgaaagagatatttccagataaacataaactgagaatttgttgccaggaaacttaccttacaataaatactaaaggaagttcttcagacagtaatttgaatccacacacacaaaagccaaagtgctctgggaaaggcaagtagatcgttatgaaaggcagtaagaatgcatatttattcaccttctcttaacagatttttaaaaataatttgtatataattgtattgtggggccaagacatatagaaatgtaatatattttgataataatagcacacaggaggtgagtgggagcagagctgtattggattaagaaagtgagaccagatgggaactggaatccacaggaacaaatgaagagaaccagaaattataagtaagaaagttaataaaacaaagtcttttaatatatacttgctctcctttcttctctcagcttcttcaaaagacataaaactatataaagtaataattataacaaagtactgttggttttgtaacatatgtagatgtaatacatataaaaagaatagtgcaaagaggaagaagagagaatagtgctatataggagtcaccgggcacggtggctcacaactttaatcccagcactttgggaggccgaggcaggccagtcacttggggccaggagttcaagaccagcctggccatgtatctctacatataatagattgaaaccatgtatctctacgtataatacaaaaattagccaggtgtggtgtcatgtgctggtaatcctagctactggggaggctgaggagaattgcttaaacccaggaggtggaggttgcagtgaaccaagatcacgccaccacactccagcctgggcaatagcacaaaaatctgccaaaaaaaaaaagatagaaatatataggagtaatatttctatatatcactggaattaagttactgtaaatctgaagtcaattctgataagttaaaacctatatagtaagcctaaactggtcattaagacaaacaaacagaacagtgaaaaagctattaaagaaatttaaggctgggcacggtggctcacacctgtaatctcaacactttgggaggctgaggtaggtggatcacctgaggtcaggagttcgagaccagcctggccaacatggtgaaaccccctccctactgaaaatacaaaaaattaggtgggtgtggtggcaggcacctataatcccagctacttgggaggctgaggcaggagaattgtttgaacctgggaggtggaggttgtagtgagccgagatcatgccattgcactccagcctgggtgacagaatgagattctgtctcaaaaacaaaaacaaaaacaaaacaaacaaaaaatccaaaaaacagaaatttaaataatacactagaaaatattcgtttagtgtaaaagatgtcaaggaagaaaagaggaacaaaaaagacatgagacatatagaaaataaaaagtcaaatgacagacataaatccaacttctctcaatgatagcattaaatgtgattggatcaagtcaaaagggagagatttcctgactaaataaaaagccaagatcaactatatactgtgtgcagaagatacactcaagattcaaaggttaaaagtaggttgggcgttaaaggctgaacaaaatatatcacgcaaacagcaaccataagaaaacttgatttgctatattaatatcaggaaaaagactttaaaatgaaatatgttacaaaagataaagaggaacattttataatggtaaaaggatcaatcgatccattgggaagacataaaaattatagacagatatgcccctaacaacaaagccccaacatgtgtgaagcaaaaacagaaagaattgaaggggcaaatagacaattcaaaaataatatttggagacttcaaaaccccacttttaataatgaatagaacaactaaacagaagactaaagaaggcaatagaggctgggcgtggtggctcatgcctgtaatcccagcactttgggaggcccaggcgggcagatcacctgaggtcaggagttcgagaccagcctgaccaacatggagaaaccccgtctctactgaaaatacaaaattagccaggtgtggtggcgcatgcctgtaatcccagctactcaggaggctgaggcaggagaatcacttgaacctgggaggcagaggtttccgtgagcccagatcacaccactgcagtccagcctgggcaacaagtgcaaaactccgtctcaaaaaaaaaaaaaaaaaaaagaaaaaaaaaagaaggcaatagaagacttgaacaacactaaaccaacaagacctaaaagacatctatagaacatttcacacaacaacaagataatacacattcttctcaagagtacgtgaaaaattatttaggacagactatatgttagaccacaaaacaaacatcaatgatttttttatcttttatttttttttttaatatggagtcttgctctgttgcccaggctgaagtgcagtggcatgatctcagctcactgcaacttcagcctcccgggttcaagcaattctcgtgcctcagcttccagagtagctgggattacaggcacccaccactatacccagctaatttttatatttttgtagagacagggtttcaccatgttcgctaggctggtcttgaactcctgacctcaagttatctgcctaagtcggcctcccagagtgctgggattacaggtgtgagcaaccgtacctggacaataaattttaaaagattgaaatcatacaaagtaccttctctgactaaaatggaatgaagctagaaatcaatagaagaaaaccaagataattcacgaatatgtgaaaattaaaaacacactcaaacaactaatgtgtcaaaatagaaatcacaagggaaattggaaaacaccatgagggaatgagaataaaaatataacataccaaaacttacgtgattcagtgaaagcagaaaaatttatagctgtaaagacctgcactaaaaagggagaaaggggccaggcgtggtagctcactcctgtaatcccagcattttgcgaggctgaggcaggcggatcacttgaggtcaggagtttgagaccagcctggccaacatggtgaaaccccatctctactaaaatataaaaattagctgggtatggtggcacatgcctgtaatcccagctacttaggaggctgaggcgggagaatcgcttgaacgcaggaggcagaggttgcagtgagccgagagcgtgccactgcactctaacctgggtgacagagtaacactccgtctcaaaaaaataaaaaataaataaaaaaatttttttaaaaaggagaaaagtctcaaaacaaccacctaactctacaccttaaagaactacagaaagaatacaaaaattagccgggcatggtgatgggcacctgtaatcccagctactctggaggctgaggcagagaatggcatgaacctgggaggcagagcttgcagtgagctgagatcgtgccactgcattccagcctgggcaacagagcgagactccgtctcaaaaaaataaataaataaataaaaaataaaaagaactagagaaagaagcacagactaaacccaaagctagcagaagaaagaaaataattaagattggagtggaagtaaacaaaatagagtatagaaaaacagtggtaaaaaaatcactgaagctgggcatggtgccacatgcctataatcccagcactttggaaggcagaggcaggtggatcacttgaggccagcagttcaagaccagcttggctaacatggtgaaaccccatctctactaaaaacacaaaaattagctgagcctggtggtggacacctgtaatcccagctatgcgggaggctgaggcaggagaatcacttgaacctgggaggcagaagttgcagtgaactgagatcatgccactgcactgcagcctgggcaacagagcaagaccctgtctcaaaaaaataaaaaataaaaaaataataaatcaaagaaacaaaaaattgatcaatcaaattgacaaacctttagctaaactggctaagaaaagaagattcaaattactaaaatcagaaatggaagttcggacagtactactgaacttacagaaataaaaataattataagaaaatactatgaacaattgtgtaccagcaaattggagaacctagatgaaacggacaaattctggccaggcgtggtggctcacgcctgtattcccagcactttgggaggcaaaggcaggcagatcacaaggtcaggagattgagaccatcctggctaacatggtgaaaccccgtctgtactaaaaatacaaaaaattagcctggcatggatggcacgtgcctgtagtcccagctactcaggaggctgagacaggagaattgcttgaacctgagagatggaggttgcagtgagccgagattgtgccactggactccagcctgggtgacagagcaagattctgtcaaaaaaaaaaaaaaagaaagaaaggaaagaaagaaagggacaagggacagattcctagatacacatgatataccaaaactgagtcatgaagaatggaaatctttatagacctgtaatgaagcagtgatcaaaagccatccaaaaaagaaaaacctttgacaagtccctggtgaattctaccagacatttaaagaagaactaacatcaatctttctcaaactcttccaaaaaatttaagaggagggtcggggggctgggagatccaacatgacctcatccacatgactggcaattggtgctgattgtcagcaggaatgtctgtgttctcctccttgcggtcactcttgctctgttaggtcagacatcatcccttacatagaggcccaagggtccaacggtccaagtccaagactgaagctgcaaggtctcttgaggcagaggctctgaaaaccacatgatgtcacttctgtcacacgctattggtcaaagcaagtcacatgcctcactcagcttcaagtcagtggagaaacagactccaccttggatgggaagaatagcagagtcacattgcaaaggggtgtggataagggttgggaggaatgtgtagccattaatttacaccagataatgtgagtgtttgcactttacaaggtccacaggtccactgatacagtttggctctgtgtccctacccacatctcaccttgaattgtaataatacccacgtgtcatgggagggaccccatgggaggtaattgaattatggggcgggtttttcttgtgctgttctcgtgataatgaagacatctcaagagatctgatgtttttatcggggggagttcccttgcctgccaccatggaagatgtcccttgactcttccttcatcttcagccatgattgtgaggcctctccagccatgtggaacagtgagtccactaaacttgtttcctttataaattacccagtctcaggtatgtctttattttattttattttattttattttattttattttattttattttatttttgagacagagtcttgctctgtcacccaggctgaagtgcaagggcaccatctcggctcactgcaacctccgcctcccacgttcaagagattcccctgcctcagcctcctgagtagctgggactacagtgcacgcctccacacccggctaatttttgtattttagtagagacagggtttcactatgttggccaggctagtgtcgaacttctgatctcatgatccacctgcctcggcctcccaaagtgctgggattacaggcatgagccaccatgcccggcctcaggtatgtctttattagagcgagagaatagactaatacatccaccaaccctaggaagtcagtggaagggtatttccgtatttcatatggaagtcatttccatatgaaaatttagccagaggatttcatgctggttgtctgaaagccaggagcttctaaaaaactttcagggtagctgtctaagcatgacctcatgtcatcctgttgtgagtactaaattagttaattcaggggaggcactcagaaaagtgaagaaagggaaatctttcttatataaatcttagaaatctcatagaaatcttaggaaagtgcctggcgtgcagtaaacacgtgatacatttcagttgttattatcttcacaataatttttttgggtcaggcttgttattttccctgttttacagattaaggggcagagactcagagatgcgcagtaagtcgcctgagggttacgcagcaaataagcagggaagccagatgagaacctacatgacagagtcacccatgtgtgagactccaaagcctcattcaggtgcacagagaggcggttgtgaggacgttcactgctgcgttgccttcagtagcttaacatcagaaacagcgcagatgtccaccaacaggggccacccagtaaaccccagcatgcccagccaaggagtgctttgtgctggttacaagaaatgaggtcacgctatacataggacatgggatcatctccaagacattctgttcagtaaaaagaacatctgaaaaaaaagttccataacccacagaaaatactgccaaatattccaaaaaatctaagtccaagtgtgtgtgtatgtgacctctggaggctgatctgaagcaaatgtaggtgaattaaacaataggatctatttataggactcttcttttcctacttttctttatttttgttggattttgaaacatgttcaaagaaaaattcagagtacaataaagtaccagtcgggcatggtggctcacgcctgtaatcccagcactttgggaggctgaggtgggtggaccacctgaggtcaggagttcgagatcagcctggccaatatggtgaaaccctgtctctgctaaaaatacaaaaattaggtgggtgtggtggcaggcacctgtaatcccagctactcgggaggctgaggcaggagaattgcttgaacccaggaggcaaaggttgcagtgagctgattgtgccactgcactccagcctgggcgacaagagtgagactgtgtctcaataaataaatgaaagaaagaaagaagaaagaaagaaagaaagaagaaagaaagaaaagaaagaaagaaagaaagaaagaaagaaagaaagaaagaaagaaagaaaaagaaaaagaaccaagaagaaaaaataatcaccggagattcctcccctcccctagagctaactaggctaacattttggtatatatctttccagtccggatcctgtgtgactgagtgtgtatatgcatatgtattattttcaactgttggctttctccttgtggtccaagacagctgctccagatttagccattacatctgtttcctgccagcaagaaagggaaaatgggaagtagagggccttttaagtatacaacctagaatttacacacattattctttatcacatctcatttctctaaatgtagtcgcatggccatcctggccagaaggaagcctgggaaatgtggtctttcctctgggctgccttgtgcccagtgaaaagtcaggggttctatgactatgaaagaaacaggagaatggatattgtggcaactagcagtgctattcacctttattctctcaatggtaatatttttccccatcaagaggggaaaatttgtgtcttacattctaaccactgaactccgagagaagacactggcctgtgccattctcttgcgatggagtttcgctctgtcgcccaggctggagtgcagtggggtgatctcagctcactgcaacctccacctcctggattcaagcaattctcaggcctcagcctcccgagtagctggaattacaggcacctgccagcacacccctttttagaccacatagggtagcttccgactgttgccatggcatttgtgaattgtcatgtgctggtgggagtgtctcttagcatgctaatatattataattagcatatatattataatgagcagtgaggaggaccagaggttgctttcatcaccatcttggttttggcgggatctggccagcttctttactgcatcctgtttgttttatcaataaggtctttgtgacatgtaccttgtgaaaccagtcctgcctaagggagcggggctggcggttgttcagagtgaacaattcaaagtcaggtcctccctcttggagctcagagacttgaagagcaaggaccactgtcaggacacaaccccatttgcaaggccggggacacacatacagacccacaggccattgtagagaaagtgttaaaagatggaagtcaagccacggccactggaagtggtgtgccctgagaggcagagggttctccctaagccagggaaggacaaggcagggcaagacagaaactgggcctggggccaggattcctgagctggggctagatttgcccaaatctagggcagggctgactgggtcaagcacagcagggagccagggtgggtcgatccccctgccacaggcttcactcttctggctctggtttccaggcagttctaaaagcctcccagtggcccagtgcagtggctaacgcctgtattcccaacgctttgagaggccttaggcgagcagatcacttaaggccaggagttcgagaccagcctgaccaacatgtcaaaaccccgtctctactaaaaatacaaaaattagccaagcgtggtggcagtgcctgtaatcccagctacttgggaggctgaggcaggagaacccaggaggtggaggttgcagtgagctgagattgtgccactgcactccagcctgggtgatagagcaagactgcatctcaaataaaataaaataaaaaaatcaaatcaaataaaatgtctcccagaatacaccaccccagcaaaatggcaggagggagtgtcacctggggacctccactttggaggtttgagtgggcagctttaagctggaacagtcactcttgctgtgggttctcagggcggagactgagcccccaccctgcctcctcaaatgcatttcctctcagctcccacctgccagcccaggagagagggagggccattctgtccttttcctgcagagtccctttgttcagttggtgaccaacatcctgaaaaacattctcaggagatcaaaaagaagaacattttggtctatgtggtaggttggcccagtgcaccacgcccagtgcaggtccctcttgaaaccacctttgggaaattatgactgagacaccacctttgcaaaattatgactgagacaatgagagatctttttttttttcctttgagacagagtttcgctcttgttgcccaggctggagtgcaatggtgtgttctcggctcactgcaacctccacctcctgggtttaagcgattctcctgcctcagcctcccgagtagctgggattacaggcacgcgccaccatgcctggctaatttttgtatttttagtagagacaggtttctccgtgttggtcaggctggcctcgaactcccaacctcacacctgaggttgcctcagcctcccaaagtgctgggattacaggcgtgagccaccacgcctggcccacagtaagaggtcgaacttaacctactctatcttgcttctaacctccaagctgtccttgttcattcctgggcataagctgaactaaccttgggagaaacttagtttatactttaaacagccctttcccaaagcagacctccttcttgcctggggactaagctgcctttgtaggactaacattagccacaaaattagaaattttggtttaggagtcatgcagctggaggctacaagatcctgaccctccctaaactactcctgacatcagggcttgagatatttttcagaccctgcacttgatggatcagctggcatcacccacgtcaataaactggctcatctgatcttgtggcccccacccaggaattgattcagctcaggaagacagcttggactccctgtgatttcaaccctgaccaatcagcactcctggtgcactggcttctccccacccaccaagttatccttaaaaactcttctccccaaatgctcggagagacagatttgagtcataaaactccagtctcccacgcagctggctctgtgtgaattactctttctctattgcatttctcctgtcttgatgaatcggctcttgatgaataggcagcctgcaaggtgaaccccttgggcggttccactctttgcccagggtgatgttatttctctccaggatggctgcagcggcttctgagcctgcttgcatctggtgtggtccctttcaatgtcacgcaggccaaagcagccctccatctctccatgatcttggcttccaaggtactctgtctctctctctgggtcgccatactggcttccatcaggccctggaatgcatcctgctggttctatcccttggccttcaaaagtgcggtttcctcctggaaggcaccttctgccttacctcacacttccttccctcctacctgccttgagataccagcttgcaggggcattcttgggaaagccgaccccttggactgagtctggagttttgatctctctctctcttttttttttttttggagatggagtttcactcttgatacccaagctggaattcaatggcgtggtctcggcttaccacaacctctgcctcccaggttcaagtgattctcctgcctcagcctcccaagtagctgggattacaggcatgtaccaccatgcctggctaattttgtatttttagtaaagatggagtttctccatgttgatcaggctggtctcgaactcccaacctcaggtgatctacctgccttggcctcccaaagtgctgggattacaggcatgagccaccgtgcctggccttttttttttttttttttttgagatggcatctcactttgtcacccaggctggagtgcagtggcaccatcatggctcactgcagcattgaactcctgggctccagcaatcctcccacctcagcctcttgagtagctgggatcacaggcatgtgccaccatgcctagctaatttttgtatttttttttgtagagacagggtctcattatgttgcccaggctggtctcaaactcctgggctcaagcaatcctcctgcctcaacctcccaaaatactgggattacacgtgtaaaccaccacatccagccctgatctcattcttcagagaatttacctagctggtcacttggtgtctgtaggagcatcgcctctcaggcctgcctcaaaactgcatttcagttgggagtggggcggggggagggagagtgtagtttggggacatcaagcgtctgtggtggatctcctcccaaagtgagactgctttttaatgatatttattgagcacttactgtttgccactgcggtgctaagcactttgcacatactagctcagtgcatccttacagcaatcctgggagggaggtgcttttctcatccgcatgtgctgacaaggctgagaagagctgggtcttgcacggtaccttaagggctaaagacctgcaaggatggtgcatgaaagcaaaaccagagaggcgccttttccaaatgccaatgcgccctccacccagtccttcacaaaccacatcagcatggatagcaccacactccacaggcttttctgcatctcctttgtgtgtgtgcacatgtgtaattaattctggggcaacttcctacatcagtacagagaaactccttgatcattatccactccaacatccttcctgggagggactgactggaaacccaaatgcccttgtaagggcaaatacaaaaactaaaataattctccctggtgcagaaaaaggaaagaaacctcccgtttcctgttcttaaacactctagagcaaacactttagaaaacttctcaattatttctctgttcctttaagatgtgtctttttaaaagccaggtgagcctcctgccagttttacaagccagggatgttttcccaaggacctaggagccatctctttggaaggtaaacatcaagattgcacccttctcatccagtctccatgggcagataggagcctaacttcagtgcttggctccaagttgcaaaacaatccatcgtctatcataaagatgtgagtttatattttctctggataaagacaattagctaacacagatggccactccaattaccaggtgaattcgggatgaaataagttgcaaattgtgttgtgcagtcatctgactcgagaactatttttttttttttgagacagagtctcgctctgttgtccagtctggagtacagtggtacgatctcagctcgctgcaacctctgcctctcaggttcaaacaattctcctgcctcagcttcccgagctgggattacaggcgtgcactaccacacctggctaatttttgtatttttagtagagatggggttttgccatgttggccaagctggtctcgaacttctgactttaagtgatctgcccaccttggcctcccaaagagttgggattacaagcatgagccaccaccccggccctagttattatttgaggacatgtatgcaataggttatacctgcttggttatataggaggacgaaatgtatttctctttgtaatctcttttgtggattgcctgtgatgcccactgcagtctggtttaacgcttatttaataataaaactgttttctcttctacttttgtggaaaggttttctggattagatctttaattttgtctccagcatcttcaaatgtctttctacagagggttggttaaataaatgtggcatctccacaaaagagaatactgcacagtcatggcaaaaaaacaaggagcctgttttcgttgttgaatgaaaagtgcaaggtgcacaacagtttactactttttctgtaaaaaaagaggtctgagaaggctgtatttgccatttgtataatctctggaagggtaaacagcgactgataaaagtgctcgtgtgtgtgtgtgtgtgtgtgtgtgtgtgtgtgttaagagaaactgggcagatgagggagaggaaagggatgaaaacctttctctgtacaccttatattttctgattttttgaaacacgtgactgtattacctattcacagtaagttaacagggatgggaagcatggtggtggcaagcaaacgaaacctctaaaaagaagtcccaggggccgggcgcagtggctaactcttatgatcttagcgctttgagaggccaaggtgggcagattgcctgaactcaggagttcgagaccagcctgggcaacatggtgagacctcgtctctactgaaaatacaaaaaatatgccaggtgtggtagtgcgcacctgtagtcccagctactccggagactgagaggcaggagagtcacttaaacctgggaggcagaggttgcagtgagccgggatcacaccactgcactccagcctgagcaacaggcaggactctgcttccaaaaaaaaaaaattagccaggtgtggtggtgggcacctgtaatcctagctactcaggaggctgaggcaggagaatcacttgaacctgggaggcagaggttgcagtgacctgagattgcgccacggcactccagcctgggtgacagagcaagactccatctcaaaacaaaaaaagccccagaaccagacatccttaagcacttgattctgttcatttctgagctcagccttgagcttagaaccaagtgaaaactaattacacattttcggagttcacattaaacttcttctttttaaaattattatttttgagacagaatcttgctctgtcacccaggctggagggcagtggcacgatctcagctcactgcagcctccacctctggggttcaagcaattctcagtctcctgagtagctgggactacaagcatgtgccaccatgaccagcaattttttgtatttttagtagagatgggtttttgccatgttggccaggctgatctcaaactcctggcctcaagtgatctgcccgccttggcctcccaaagtgctgggattacaggtgtgagccactgtgccatgcctgaacttctcctttgaaggaagatctgagtgtaaaagcagggaatgcctttatttaaaaaaatgaaaaacagaaactaaaacaaaataacaatcacctctgttgcctccatttgagagaatacttccaggggctctgcatgtctggtccccaacctggtcggggagttcactttcagaggctcagggatgggccttccccagccccaccagcaaatcatctctcccggcttccaggagggtacttactctccaactagtgggctttatgggccaggaaggatgacaggaaggggtgtgtggggtactacgtccctccacactgagaatccgaaagccaagatgcccaagattctatcgttatctgcttgtcttgtagaagcccctctgtgagactgaggggcaaaggagagagggcaggggcgtgtctcaacccttctggccacttctaggttgtgcagactgccactcttgttactacgatggactgtcagatcagcaggtggcccaggagggcttgcttgatgcgggctgctttttccttttgcctccgtgccatgcctgtgaggtagttggtacttactggaatccccactgcatgcatgaagaaacaggcacagagaagccaaatgactttcccaaggtcacacagcctgaagggacagccggctgtcccagctgtttcccttctaacacccttgggcctgcctccagctagatgctgcaaatcagtcctctcttgagagtcaaagcaaaggagatctgagctggtcgtcacaggtagtgtgacacagagttggggatagagccgcaccttgcatttccaggtgccatcttccccacagtccccagtgggcacttgcgttcatgattcaattactcaggctctgtctctctgttcctgccccttgctctgtgacctggcctctctggaccccagttccgtccgtgagcgatgggggcggggtcggcggcctgcctaggctggacagtgcagattgcagaagtccgcggacgagaagagccgcagcacgttgaccagagggaacatgagcagcgctccgagcagcgagcccagctgcaccgccgccccgcaccacaagagggcgctgcggctgaggtcgcgcaggaccacgcccagcatcaccttgacgtaactgaggcagccgctgaaaagcacccacgaggccacctgcggggccgggagggaagaggtgcagagtcacggggcttgcggggcgagcgccggagcaaagaactctcacagggctcaggggaacccacggaatactctctaggtgcgaggagcgccttctgggagtgagcctgcggggccgacgggtcccatgagttggccgcccgggggcgaaggagaatccagtggcttttctgggttcacgtgcccatgatcagggcaagggcccttgagagaaggcccctgctgaggtacacatggtgggaagaggcctaccagtcacctcgattccctaagcctccactcccaaatgaggaaggggcgcttcccccacctggggcttcccgggagggtcccacagaccccgctcgctggaaagggccgcgcccaagctctcccaggccttggctaggggtgaggggtacgcagcgggagcagccccaccggccggatactcacaatgaggacttccccaccccagtggccctgcaagagggggcaggggctcatcaccgccatggccatgttgtagcccccaaagcaggtcccaagcacggagaggacccccaggaacagcagagacctagaggaaagtaggggaggtgagtggaggtgagaagcctgacctctgacccccccgccccactgggcggcatgtggatggccagtgtctccatagttagtttagacccatgtggaaaattccaggttgcctggctcaagtgggtcagggaggctcctgagcaggcagggctggcctgagtcatccccagcattaacggcagggcctggcaccccggcaagaaaaacataatggactctggcaccggatggtcctggttcaaatcccagttctactgtttaagctgagactcgcctctgagcctccaaatcggagttttgcaaggctgcatgacctccaggagcagagcatgcaggcctggcgccgctgtgggcccacctggtgtttacctgctggcatttcctcctgcaacacaccctcagcctcagccaggaagctgagttgaagtgaagatggctggatcgggcattggcacagtagggtttgctgtgcctcctcaggagacccctccccttctggcctcagctacctgcctctgcaatgtggagtgtgctgatctccaggggtcctggcagctggcttgttgctgctaggagcatctctctacaggtggccttccatgcaaacctacatctgggaccactgtccttcctcacaggtccttgtccctggggtcccaatctctagaaccccaagactggtccacgccctgggtaagaacagacagaggtctgcctatacccttaaagactctttctgctccaagattcttggattccatgactcagattctgtaattctaacatttggggtttcttggatttgcaggtctgagcctttggtcctgcttccctcaaatcctccatcctctttccagtttctaggtcccaaggtagaaaatccagcttcctggcaagctttctgtcaagctcttctgtcctcactgtccttcttctgggctgggagagtgggtgtaagcaggccagtgaggacaggcaggccagcgtggatacgaggctgtaggacccacctcaaatgtcaagatcccaaggtggtagttctcctacaggggtctgaagcccctgcctcagaaccgtctggtttccttactaaaaattgaaatcccaggtcccagtctaggctggttcaatctgcattttatcaacttgcccagccattcttctagaactgtggctctaagggaaccagcaggaggttagaggcaggaaggcagggccgaaatcctgggaattagaccaggtcaagctctttctccaagcctcagggtttccccttataaacgggaacctcagtggctatctgctcctcctcatggactgatgacaatgatggtcaacgcttaggctggacctgccacgtgccaggcaccgctccaagagctttatagaatcagctcatatcatgcttccagcagtcctaggaggtggaatgttacactcccattttccgataaatatccctgaggcacagagaactgaagtgacttgtcttacacacagctgacaggtggcagagctgggatttggaccagggtgctccccaaacatgttcttaaccactacatgtacagcccagtaggtgcgtttggaattctgggttctgaaatgaagtgttcccccactaggattccctaggaccagatgagggcacacctgttaggcaggaacatggagaccaacgaggcaagagggttggccacaatgctgagggtggcagccaggtggtaggcaactggcccataggacaggcaggagtaggtctgcacagagggcagcatgccgttggtgagcgcgttgacgaaggccaccagggtatagatgaaggccaggtgcgccgggcagcagggggctgctttctcctctagatacccctggccctggctgctgtccaccgtgcctgcagggcccaagtcattctcttcccgcggccggatggagtggagggtgacctggtcattgaggaggtcttccacggaagcctcccagcacctgggttgacgctggaggacaaagaacgccacgaggcagcaggccatcatgatggataggaggaggaagaagaccaggggtgagaagtgggcgggaaggtagcggctctccaggtgggacaagggtgcttccattccggggagggcggacaccaaagctctgggaactccctgcaaaggacaagacagatccctggtcaggggaggggatcaggctgcagaacaacaatcatgacagtgataacagaatacagatcacctgttattattaatggataatgaataaataaacataactaacaaggtggcaataatgactgctcatactgactgcccactgagcacgggcactgtgcatggataagcccctatgcctcctaacagggctgcacagtgggcaccatcatcccccattttagagggaactgaggtatcagaatgcttcgtcccttacctgagggtcacagggagaatgtggcaaagccagactccacctggtgctttctgacttggaagctacaccttttatcaccccacagcagtggcaaccacaaacatgttcagaggaggagctagctggagactgagcagtggagccgcccacctaagaggagagcccccacctaaggggagaatcccccacctaaggggagagcccccacctaaggggagaatcccccacctaaggggagagcccccacctaaggaagaacactgctccacccatcgtctaggaaataagggccttcaggacatgccatcccaaaatatgactgtaggaggccagaatatgccaccccaaaattgacctattggcatattttttatttctagctggttattttgaaaaattgcaggctaaggagtagctctgaaaagttgccattttgtaagataaatttacatctaaaggaaatttttattagtaaagctatcttatctgtaccaagaaaaggtatctgtaccacgaaggggtatctgaaccaggaagagaaaggtgatggcctttatcacccgaggaacttttatctgcataacagtgcaatgtttattcaccataagtttcctcccttcactctcccataatttgtctccaccatcctgcagtagcctcaagcccctattcccttttgtagctcaggatgctatagaagctgaaatcatctggcccttttttgagtctcatattttttggggactcccatgcgtatgtatgtaagtaattaaaatgagtttcctgctgttgatctgccttatgtcagtttaactcataggccgaccaaagaacctagaaggatggaggtgagcagtttttccctcccctacatttgtgataaagccaagtgctgagatggctccgggtgatgctgggtacctgtgcgatgtcagtctccctcgtgggtacagggcttggtacgctgtctgatatctcagtgacattgacgcaggtagtgagaccggagccctgggcaagagccaccagggcgggcaagaggccgctgagtccttcacccacaaagaaggtggtgaggtagtaggtgggcagccggctcatgaacggcaggaaggtcactgaagaggtgcagtccaccagggccaggaagaaggtgaggaccaagaaggcgatgctgtggtggccgtccagcacccaggaggtcatattccagaggaaggcaaagatgatgcaggtgacggttcccacgcccagcagggtgaagatgatgggcacttcggaaaggcagctgggccggaagtgatggagcagggtgaccaggaggggcccgatgttggccagctggatgaccaccgtgaggtaggagggcaggtaccagccctcgggcagctccatcaccagcaggggcagctctacccagagcccattgatggtcacccaggagcccattccgaagacgcagaccagcaggtgcatcaggaaggccatggcggtatctgccctgggccagaggctttctcagatcagcctgcagcggggctggcagagaaggacaccaggtgagtaattccagcttcaccacctagcaagatgctgggacctggggcccagagttttctcttattactccccttcctgtgaacaagctggcttttttttttttcctttgagacatagtttcactcttttagtccaggctggagtgcaatgggatgatctcggctcagtgaccctctgcctcctgggctcaagtgattctcctgcctcagtttcccaaatagctgggattacaggtgcatgccaccatgccagctaattttgtatttttagtggaaacagggtttccccacgttggtcaggctggtctcgaactcctggcctcaggtgatccgcctgcctcggcctcccaaagtgctgggattacagtgtgagccaccacgcctggcccaagctgtctttttattagcagaaaacaagagaagcctttcctaaccgtgattcatgaaagaaaagttcaatccgacacacaaaagcaaacaaagcagcttctgcaaaagataccaacagcaaggtcaaaagttaaatgaaaacacggggaaaacatttgccacataaatcacagacaaagggctcatcttccttgtcaggcctctgagcccaagcctgcgcgtgtacatccagatggcctgaagtaactgaagaatcacaaaagaagtgaaaatggccggttcctgccttaactgatgatattaccttgtgaaattccttctcctggctcagaagctcccctactgagcaccttgtgacccccacccctgcccgccagggaacaaccccctttgactgtaattttccactacctacccaaatcctataaaactgccccacccctatctcccttcgctgactctcttttcggactcagcccgcctgcacccaggtgaaataaacagccttgttgctcacacaaagcctgtttgatggtctcttcacatggacgcgcgtgacattcctaatatataaagagtttttaaaaatcaagaacaaagagaccccatatagaagagggccaaggatatgaacaattcagagaaaaaggtacaaataagctttaaacacatgaaaatattatcaccttcattcacaataggaaaactactccaggtgccatttctcaccatgagattgtcccaaagcctgacaaaatgactcatgttcaaggttattatagattgcgatcttgttggtaatagcaagttatgggaaattttctcctgggtggctaccaacagagagggggctaattaaagggacctgctggaataccacatacctgtttaaaggaataagaaataaggaaagcagatcttggtgactgataaggaaaggtctccaggctataataataatcttgaaacaaaatcaaggcaggtaaatggaaccaggaaaaagtgtactgccttttggtcatagaagaggaggaaaaacatgttttctttgcttgtacttgcacaaagcaacccttgaaggacacacagggactgcagggatgttggtgatgcctctgtatatcttttttttttttcttgtgacagagtcttactctgtcaccaggctggagtgaagtggcacaatctcagctcactgcaacctctacctcccgggttcaagtgattctcctgcctcagcctcccaagtagctgggactacaggcgcccaccactacgcccagctaattttttgtatttttattagagatggggtttctccgtgttagccaggatggtctcaatctcctgatcttgtgatccaccctcctcagcctcccaaagtgctgggattacaggcatgagccaccgctcctggccctgcctctgtatatcttttaataagagttttgatttgtgaaccatgtaaacatattacctgatgcaaatatatggttacctgaaataagatttcaatctggctttttttcctcctgaaattatatcactctctacgtggcctttggagaccacttcctctagccctccagagccattctgccatctgtttacccctttgtcagctaccagtggcagcccacctgtgctgttactaacaactttcttctatctatccttagtctgagcagtaatatgggagatgccaggagtgaggctctggagccagctgtttgagtttgaccctggctctgctgcttacaatctgggtgaccctgggcaagtggctttgcctctctctgcctcatctcctcatctgtaagtaggggatagtgatagtatgaactccgtggtttgttgtgagatataaggatgctggtgagtttatgctgtttccaacagtcccagcatagggtaagcacctctaagggttactgatcattatcgtgaaatggcaggtttggtgacatcgttatttttgtctaattcacatgagaattaatacatgactatgaaaatttaaaaaaggaaaagattcccctactaggtatcaagtgaactcaccagtggtatatgcacctttttgtagagacacgctaactgggccaatcttcacgttttgtagatgggagacgaggtccgaaggggcagaggggctctcctgggatctggactggatcctctgcagcaagcggcctgtccgggactcctcagttcacgctgcagtctttaactccatacttcttccttctagtacaaagcaggagtgtccgttgtggccacgcctcacccaggaaactcctgaatcctggcagctcctccccacggttcccacacacggaattccctcacagggctgggacttccttcctcataccttcactgagcgaacccaatgctcagtggcctttctggtcacctccttttcctctctgggaggagccactcctggggtgtaacgcagtcagatcccctagcagtcccgctctgccccctcccttctgggggcctcagactccattccctcccttaggaagctgacttgactaatagcacaggtgaggcccactccaggcgtgccaagaggacccaaggagggaggggaagctcccagacagcagtggcacacctttgcctgtgctgtcctcccagcctggagcaccagccccctctgctgtccacatccaagctttctacaagactccgtcctccaggagacctctggctgcctcaccttctcaggcgtcctcaccagggcccatgaccccttcatttcaggttgttcttgtgtgggtgcatgcaggcacataccttgagactgaagctttttgagggcaggggctgcttgggaatctgacattttgaaggtggaagggcctttctcaatgacttagcttaggatttgtaaattgttaactcactggccactgccagacagcagatatattactttggtttgcccagtgtgtttaacaatttgttactgtaatcagcagtggaggggatggcaagcaaccttcagcatttctggcttctcaggaatattttggaagaagtggccccccactttggcctctttctctgttctagactcgggccatcttggagctctcccctgcggtaacatctggaaccagttgcctgggttcaaatcccagcttcaacccttacaagctgagcaagtgacctaacctcctgtgcttcagagtcttctcttgcaaaacagctataggctgtcagtaccaacatcagaactgttgctaggaacatgcactaaagtgctaaaactgtgcctgccacatagtgagggctcaatgaaccatcattataagattactatttcagcaaacgtatcagttgcattcaaaaacatgtagttattggccaggcgcggtggctcacgtctgtaatcctagcactttgggaggatgaggcgggcggatcccttgaggtcatgagtccgagactggcctggccaacatggcaaaaccccgtctctactaaaaatacaaaaattagcccagcatggtggcgcacacctgtaatcccagctactcaggaggctgaggccggagaacggctccaacctgggaggtggaggttgcagtgagccgagatcatgccactgcactccagcctgggcaacagagcgagactccatcttaaaaaagaaaaaataaaaaaaaggcgcagtttttgttagacaaatggccactcaactaaaggactacatttcccagccttctttgtagctgcacatggccatgtcatcaagcacaggccaatgaattcaaatgcgactttgagtagtctccttagcccgtttcctgtttagaaaaaaaagtgcagctcgttgccagcactcatttaattttatgtaaacgtgctatttgaggctgaagcaaatctgattctgactgctgttttttttttttttcttttgagacagagtcttactgtgtagcccaggctggactacagtggcttgatctcggctcacagcaacctccgcctcccgagttcaagcagttctcgtgcctcagtctccttagtagctgggattacaggcgtgcaccacaatgtccggctaattttttatatttcttagtagagacggggtttctccatgttgccaggctggtctcgaactcctgggttcaagtgatccccacgcctcagcctcccagagtgctgggattgcaggcgtgagccaccaagcccagccctaaatctgactgattttcaatgtgaaaataacatgtaaaaactgtttttgaagttatttctaaccagaactaacatcagactcatctatttcagaaaaactggattcatcaaacgaatctttggtcaacaactgttcaagaacaatgttaacatcacacataggaatgctaggatttgctattttcagcgatcgagaattactttgttttgtaaatggaaataccacgactaaaaccagaatgctacaaatagagtgatgtcttttgtttccaaagtcaatatactagagcaaggcaaaaataataataaaagcgaggtattttgtggcaaagttatcttggggtaaacactgcagtcacaagtgggtattccttctggcaaacagggaaagagttaacaataagggagtgtgcccttctgctcttcctccatttggctgtctggaatcagatgtgatggccagaactccagcaacgattttgtgctatgaggcatgtggtgggggttagatgcatactaggctcctttgggattttgtggcagagagcacccataccagccctgttttgcctgtgttgaactgttttgtttgtttgtttaatgttgttgttaaattgtaaaagaaacttctatgttgtttaagtcactcttattttatgtacaacaaaagtactcagaggctgggtgcagtggctcactcgtataattccagcactttgggaggctgatgttggcagatcacttgaggtcaggagttcaagaccagcctccaactggtcaacatggtaaaaccctgtctttaccaaaaacacaaaaaattagccaggtatggtggtgggcacctgtaattctagctactcgggaggctgaagcaggagaattgcttgaactcgggatgtggaggttgtagtgagccaagagcacgccagtgcactctagcctcggcgacaaagcaagactcttgtctcaaaaaactaaaagaaacaaacagacaaaaactactccatactaagtgcacagagatacacattccaggatatatattgaaagattatagtaaccaaaaactaatgaatacatttatctcctttaccacctactttctgactctgaaacttaggtcctgtcccaaccaggatttgatcaaaaatcaaaatttaacaaaagtagttgtttagacccttgggggcaaatgtcttgcagagatatgaaaaaaaaaaaaaaaaggagaagagagaaagagggaggaacagaggaacacagaaccctccatatagcatttggtaccaaaagtataaattgagaccaagagtcatttcatatatcaaaactctaattcataaaggagtcaaaattgtagtgactatctgtattctgaatatttcctgaaatagcctcagacattccaggagaaatggacagaagcacagtccagcagtacaggcctgactcacccttccaggtcaagacagcagacgaaggtgcaaaataaacaaggatatagcaaaagcaataaatgatatacctagtaaagagggctaagtcagtagttaaggggagtaggcgaatttgcagatgatggtgacctttgccatatgaaaagctattaaactaatgagagtgtccagttaaacatttacaaacatcagtagctttcccacagagggctggatggggagatgagggcagacagggcagaagtagcctcactttcttgtatgttcgacaactcctaagctctgaacgcctaaatccctgctccccacaaagacgaattctctggttttgacccaggtgctaccacggctgtgtcacttgagggatgggatttggctccgggggtctgtttccttgtctggaaaccaggcacagtgggggtgtgtccccacgtgacccatctgccctatggccctggcccactcccaaattatctccttcctcaaaagtgaggtgtgcttttggacctcggggacacagtgaggaacagtcattaatgtcaatgaaggggatgtcttaggcagagggaactacatgtgcaaaaaggccccagagaaaaggagagactcagaatggctggtgttcggaatgtgttgggatacttttaaaagatgcatatctgtattttctgttttttttttttttgttgttgttgtttgtttgtttattttacagtgaccttgcagttcttatttattcattttaaccagtatttcttgggcaccaactgtgtgctcaaccacaatccctgctctcaggaagttggaggaagcattcacgaagcagaataaaaaacagaaacatagagcaggtcagatggtggcaaggactccggaggaaagcaaagctcctgaatggggaatgtgccgctgtcaaggagaggacatgaagggagtgtgggagtgagctgtctgcagaaagcacggtccaggggagaaaacagcaagtgaaaaggccctggggtgcggccacacctgctctgtcccagaagtggattttgctgttcaaaggacagctaggaggccagtgtggccgcagcagcgggagccaggttggaggggaggagacagggcaggtcccctgtggccctgtggtgacagcttgggtgttttctctagagcaaaaagctccgtgagtgggcagaagagaccagctctaatctagtttttaacaggatcgtgctggctgttgtgaggagaaacatgaggcgccagggaggaagcaggagtaaaccttcggagggttaggaagctgtagcaaaagagctaacaatcaccatgacaacagtgacaaccatagctgccactcctcagctatttattgtgccagaccctgtgctaagctctttgaacacattacctgtcaaatcttgttccacaatcctgaggctggcattatgattatctccattttacagatgaggaaactgaggtttaaaagggaaataaatttgcctagggtcatacagctgggagctgagctttacatccaggcatgcttgactgtggacccagccctgagaaaggcctcagggtgaaggggttctgaaggggccatgggggtcaagctgagcaggatctctttctgctcacagatggcctcccaagacttgggccagagaaagagagaaatggggtacaggctcaggagaagctgagagaggctctgagacatatctgcttcccaaggatccaggaccccttatgtgatcaccagagaccagaaacctaaggcttcgcatgagacagttaagatgccccataatgcgtgggcgacagatagagaagctagaaggatcagttccaggcaaaggtttctcttttgcattcttgcatcaaaagctgtgagcccccagcccaagaaagtgaagagaattgggagtggggttctgaccagggccagtgcaccgtcattgtgtgggctgggccatctcctccagggagctcaggcagcttccatcccacccaatgtcccccgcccccctccacattctcctgccctctgttttcctccatcaaagtattactgacaccagctcagttacgggagtttatctgtgtctatctgttgagcgctggtctctcccattggagtgtaatctccatgtgagcgggggcttgtcctctcccccagtgcccaggtgaccatctggcttgccacgggctgggccacctgagctcctggcaccatggctgggttctcgctctgcagggataatctgccagctggtaggcacctagccctgtgggccagactggaggaaacccgcctcagctatgagggttgtgttggccagggtgacccctggggcagtgccaggtggcagcctgacactggatacatctcactcctgggcaagggtctgagccaattctttcctgggttccaggctcctggagaacttagtgaggcctgtaggcgtctacttagggcctggcctcaccctcatgagagtgggtaggaatggactgactttgagcccatgaagaagggaggctgagaggtcaaaccacaaaacccacagggagagatgggggagatgaaggggagtgagagagaagagactgagacaaagagacagaaagaaccgaaagctagaagcagaaatggggagaaaggacaacagaggcacagagacagggaaaaatgagaagctgcggctgagagggaggcagggaggtgccaggaggcaggaggcagctggggcgctgggagcctggcctcagccaccctcactgttcacagccacatgtagcagaaggccatctctacctcttgttgctgggacctcagagttcccctgaaactcatcccaactcaatgtccctattgcacaggtggggaaaccaaggcccagagaggagatagtgcttccccgaaccctgccccacccctgatctcaggctgtggcagacattcaggcctgtgctcaccggctgtgcaacctcaggtcagctgctcaccctctctaggccttggtttctccatctgtgaaagggtctgggaatgcccagcctttctgggctcagcagaccaggaaaaagggaatgagataacaggcgctcagcctggccagtagaagcggacagtgagttctcttcccccttctcctccctcccaaggccaggaagggcttcaggcctcccatggggctgaccttggtggagcagcctcccccaggccagttcccctcccctccacgtccatcccaactcccagcctccttcccaggctcctgcggcttcagcctggtcaagttgttccgagatagcatggagatggccctgggtaaagtcagtgggggcccagtcttttttttttttttttttttttttaagacaggatgtcgctctgtcacccaggctgaagtgctgtggcatgatctgagctcactgcagcctcaaccttcctggctcatgcgattctcccacctcagcctctgagtagctgggactattaacccatgccaccacgtccgacctgggtaatttttgtattttttgtatagatggagtttcgccacgttgcccaggctggtcttgaactccctgagctcaagcgattcacctgcctcagtctccagaagtgctgggattacaggcgtgagccatgacacccagcatgggcccagccttttggtctggaggcaccaggggtctggaattcacctggatggctcagcctgtcccgactccaacatgccagctgaggaggaaacctttcttccctcctgtccctttgatctttcacctggatggctcagcctgtcctgactccacatgccagctgaggaggaaacctttcttccctcctatctctttggactctcccgacatggcagcctgaaactaggggaaaggccacgggacacctgctggctccagataagtgcccctgccatatcctggtcagtgtcccatgctcctagctagcaggcagccttggtagctgcagctgcaccctcacaggcctgagccgccccgctttgcccacttacctgctggtccagttccccagccgctctgcatgggaggggccagaggcagctcgttttgtataaagctgtccccgcccagagctcggggaaaggcaggcggagggtgggtgtggctcccggcaagaccaggcgcctactatgtgtctctgatctgccctacagcccagctaggaggaggatccagatggtagaactgtataataaagggcttgctttattgaggctctctgccacccagatttcatgagggttgatccccagttgacaaaagctatgtgcaaacagttggttctggcatcaccctgagatctccataattcctttcacacaggaagagagttccctggagcaaaaacagttcaaatactggtgcttcagtaagtcatgtggaaagcggggataataatagtgccctcttcataggacagaaatcctaactgccagtgtgcactgagctgactcagtgtcaggcatgttcttggggcttgagagaaattaatgcatttaatcttcatggccttttggagagatgctattactatccctattttccagatgaagaaacaggcccagagaagtcgagagccttgtgtaggtcacacaccttgtatatggcagaactggtctctgatgcacactgagctaccctgacaaatactgtaaccacctgaggggttctttctgcccactgcataaagaaagaccatgaggctggccatgccacaggggaaatgagtttgttcccaaatcatcttcaaagcttgtaggtgaggggtttttcaaaggcagtataggggaagagttgggggtggccaggtaacaggtgcttgctgctgattggttggggtggagatgaaatcatagggggttgaagctgtgctcctacaggctgaatcgcttttggggggggggccacaggagcagggttggcggtcctggtggagacatcaggtttaggtggagccatgggtgtcaaatctgcaaaaaacctggaaagatggcggggcgtggtgggtcatgcctgtaatcccagcactttgggaggccgaggcgggtggattacctgaggtcaggaattcaggaccagcctgaccaaaatggcgaaaccctgtctccactaaaaatacaaaaattagccgggcatgatggcggacacctgtaatcccagctactggagagactgaggcaggagaattgcttgagcccgggaggcggaggttgcagtgagccgagatcgcgccgttgcactccagcctggacaatagagcaagactctgtctcaataaaacaaaaacaaacaaacaaacaaacaaaaaacaaaaaaaaaacaccaactggaaagatatctcaaaaggccaacctgcaacagtggtgttatttgcaggagtaattggggaagttgcatatcttataacctccagaataatggctggcaatcatttatgtctacaccttaggaggacccaggctcctcttctttccccagcctgatggcctctcattaactttacaaaagtggttgctcacagtgctacggcctgtaagtgcagggccaggatgtgaatgcagactcaaattggtgcctccatggatgtaaaacatattgcacagattctgacacctagtaaatgctcagtgcatattgacttctacaaataattctggcctgcctgttgtgttattttccaagacattcatttacttaacaagcaatcaatcactctccaggctaatgcttggggcgagaggtgagcaggcactagggaaggggccagacccctcgcttagcaggcaggtgttcaggaagtgttgccactgttggggctcaggacatacacacccccaaaatatgactctgggaaaccagaatgtgccacccccaaatacacctctttgacatactttgagctggttattcagagaaactgcagacacaggagtagctctggaaagctattctttggtaaaagaaatttacatctatcaaggaaatctacattagtaaaggtgcctgtatcaggaaaaaggctgctccagaagaattaccctagagactttcttttttttttttttttttaagatacaatttcacttttttttgcccaggctggagtgcaatgctgcaatctcggctcactgcagcctccgcctcccgggttcaagtgattctcctgccacagcctcccaagtaactgggattataggcgcacgccaccatgcccagctaattttgtatttgtagtagagacaaggtttcaccatgttggccaggctggtcccgaactcctgacctcaggtgatcttcttgcctctgcctcccaaagtgctgggattacaggcttgagccactacactggccaccagacagacttttatctgcacaggaagacaaccattatttaccatacaataattcttcccctcaccctcccataactgtgtctccgccaatcccccaaagccctaagaccctattccttaaacttcaatcatctgacccttctttgagtctcatattttgtgggatttccacgcacagatatgtaattaaatatggtttctctcctgttactcagtttcatgtcaatttaattcatagcccagccaaagaaccatgaaaggtggagggaagccatgtttcccttctctatagtaccaaatactttggatctgttaaaaaaaaattgcaggactctaaatttatgatgccaagggagaagttaagccttgcagagtgtgagttatgtggcttgcaggatggccactttcttcttctttttttttttttttgagacggagtctcactctgtcgcccaggctggagtgcagcggccaggctggtctcgaactcctgacctcaggtgatctgcctgccttggtctcccaaagtgctgggattacaggcatgagccactgtgcctggccacaatttcatacttatctctgccaaatactataaggtgtcaaaatttggcatagagggtacaaaactataactcaatccaaacagaataatctttgcttgtataattttttaataatgaaacatcaatattggtttaataaaggcagctatatcttgaactatttagttaaataccctaacttctaatcctgtggccttaggaagtctagtctacagacgtgaaggaagtttctttagggaaaggacttatcatctttgatattaaagaaaagagaatttatataaaaataatcttatatggtaaattcttgttctaaagtaaatgaattggttgtttaaaaagaaggatgtttacaacgagtcagaaagttgaggcatgtcagagattgtgtaaattgtaaaaattttataaaagggaatttatgcaagaaatgttgtacagtttaaaagtgatgagggggccgggcacggtggctcacgcctgtaatcccagcactttgggaggccaacgcgggtggatcacctcaggtcaggagttggagaccagcctggccaacaagatgaaaccctgtctctactaaaaatacaaaaaattggctgggcatggtggtgggtgcctgtaatcccagctactcgggaggctgaggcagaatagcttgaacccagaggcagaggttgcagtaagctgagattgcaccactgcactccaggctgggcgacaagagtgacattccatctaaagaaaacaaaaacaagagcgactaggcctcctgaatgctttataaaatgccaccataactcttaactgtacaacttgcctgctttgtagctgggtaagacctagcacacatggagttaaatgctggaataagtcagaccttatctgcacttctgtctaggtcctaggctctacatctagtacataattacaatctcaaactgactaacaaaagtaaaagttgctaaaagttaacagtgtaacatgtattgttccatagaaagaatctaagataagactgtaaagctgaggctagccgtggaattgtaccattaaatacctatgagtttcctcttgaggttgcaagataacctagggttcccggcctctcagaaagggcattctttgcttaccacagatcagaagccctatacagggactgtgtacacaaaatataaggccagtttccaagggctttcttggcttcgtaaatcaagtttgattccttaaaggaaagcataccattccagtcaaggccttggtaaaaaaaccagtttttccaattgtgtcctgttacaaaagaaaacagattcttattacacttgtgcaaataactatatcgccataacttaagaatactcacagatagtttccaaattctggagaaaatcagggagagagaaacaagtatgctacaaattttgttcatgggagtatactaaattgttaaaagctgttaatagctcaaaagaaaaatttcgaggccggatgcagtggctcatgcctgtaatcccagcactttgggaggccgaggcgggcggatcgcctgaggtcgggagttagagaccagcctgaccaacatggagaaaccccatctctactaaaaatgcaaaattggctgggtgtggtggtggcacatgcctgtaatcccagctactcaggaggctgaggcaggagaatcgcttgaacccaggaggaggaggttgtggtgagccgagactgcaccattgcactctggcctgggcaacaagagcgaaactccgtctaaaaataaaataaaataaagaaaagtttctttgactttgaaaagcaaaacaaagtattagcaatattttaagcaaaatatcaaaaagatcactccagtctcctattagttcagttcgtgcagttaattcctgtcctgcttgatattaatgaacattttagctaagagtcctaaccatttttcctgtattctgatgtcacaatctccaaatttatcagaaacctgcattcaagaacacctgttagagctttatagctgagtataaaacccttctaaagaggatcaaaacaagacaacaattgtttatggatgaccaaaagttttagggtagccatagttaaagacacaattgacaaggaaatctgttacttctgtggcacacaataattttaacataacaattataattactactgataacacacactaagacatatcagaattataggagtctcccataactttggaacacataccaataacatatttatacaaatatggcccaaagaaagccaaacattattttatatttgacaatgcttcctgtatgacttcataccaaataagccaaattttacctttatattagtgtgttattaatgttaaactcaattttaatgttttgatcataaggtcagattttcatggacccttttttttttttgagacagagtctcgctctgtcgtgggcgacagagtgcagtggagcaatcttggctcactgcaacctccacctcctgggttcaagctattcttctgcctcagcctcctgagtagctgggactacaggtgcccaccaccatgcctggctaattttttgtgtttttagtagagatggggtttcaccgtgttagccaggatggtcttcatctcctgacctcgtgatccgcctgcctcggcctcccaaagtgctgggattacaggcgtgagccattgcggctggcctatagaccatttttaaccctttataatttttgtcaaagagcaggttagtgctttaagaaaaacccattgtgcttttattttaatactcaatttacagaaaaactggatgatacacctttaactttagccaagatgtttacacacagtatttcctttacaattaaccttccaaaagttgcttaaaccttcatttttattttattcaacttaaaacaattctttaaccttttaatctaggtaaaaatccacattctcatgcctccttataatctttttaccaaaagtatatgtaaactgttttttcaatagtcttaaatacatgttacactgttaacttttttttttaaggcctacgtaacaaataattattcttggctgggtgtggtggctcacgcctgtagtcccagcactttgggaggccgaggcaggtagatcacctgaggtcaggagtttgagacaagccttgccaacatggcaaaaccctgtctctacaaaaatacaaaaattagctgggcgtggtggtgggtgcttgcaatcccacctactcgggaggctgaggcaggagaatcacttgaacccgggaggcagaggttgcggtgagcttagattgcaccactgcactccagcctgggtgacaagagcgagactccatcttgggggggaaaaaatgggaaactggagagagaaaattacatttcagaaactataacacacctgttattaaattccagtgttgcctaatgttgttcaatttttattactttaaattaaattctaatttttctgactacgagtttccaaaataagctttgttttcttaaagccctatgaactgaaaactagacgtttcagcaggcactgcctctaaacgccccccagccatcacaggaggaaacctcttcactgctggagctgacaactaataactgagcgtgcctggaatcctttgcccccacatctaataagtccatggaacccagggtaattgagatggcatctcttacaagaatcaacttctgggtcaggtgcggtggctcacgcctgtaatcccaacactttgggaggccaaggtgagtggatcacttgaggtcaggagtctgagaccagcctggccaacatggtgaaaccccatctctaccaaaaatataaaaaagttagctgggcatggtggtgcatgcctgtaatcccagttattcgggaggctgaggcatgataatcacttgaacccaggaggtggaagttgtggtgagccgagatcgcgccattgcactccagactggcgacagagcgagactccatcttaaaaaacgaaacaaaacaaaaaaacaggaatcaacatctggatacattacactcgagtcaaagcctggaaagctgaggaagcaacccctgatagccaaaggaacatcctaaatatcagtgtaaagaaataggaaattttaagctcataaaaggtaagtaactgagtgagaactacttatcttactcagtctcacccctacctcaccaaatacttttagatgttcctacctctccttttaagacaaatattaaaactttttaatggaaattattcactacaccaccattgtgggaactgctttacacactctattatttgcagtgggactatgtactacagcaccctcaggatggaatatcagacagagaatctcaattatggtaccattttgcttaattattatcctcatagcaggaataacagttactaacagcaaataacacatgggcctttccagacatgtgcctctgcctgtcattgggtgaggaatgttgtttctatatcaaccaattaggcctagtaagaggtgctgttgaaaaacttaaggaaagggctataccaaaacaaccaaatagattcttggtttaggaacaaaatcatagcatgggtcatcccattcctgggacctttcctaataatatgcctaggactaatgttcttaccctgcctaattaacctttttcaaagatttttaactgacaggatcatggccatttcacagacaactacccaaaaacatccacagacagcgttactgctacagttaatccaagaccagaaaactctgtcccctcatcagcaggaagtagccagaaagaacaccctgcctttcatcctttttataactataaggtctggattgacagagcaggagcattgccatcttggacaagcactgccattctaaagttccccttgatcaaaaaccacctaaatccaaagggcatcagcctaatggctaaggtcagcatgaccataaaccacaaatgacatctctgaccagaaacattccaaccataagttaaagccctccccgaccagagacgtgccagccccaagataacctcccctccaggtggagagatgtcagccccaagataccgtcccttccaaccagagacattccaaccctcaatagacttctcccctacacaggaacattccaagcctgtgataagctctcttacccagaaaccagtaaatacccttagtatgtaagagagagcattcctgactgaaattggacagaggcccctctcaggtttattcttcaaaataaacctgtctttgactgttgagcctcttttcatgtttctttcctctttcttgaactcttacaacacctttgttaggcgcaaattttcagtgctgcaaaagaaatagcactcgaacataaatttaattttctcagcaaggcaattttacttctatagaagggtgtgacttgtggatggaacaatggtgagagcacacctgaacaagggaggggaaggggtttttattcctgatgcaggtagcccctactgctgtgtggttcccctgttgactaggattggaccacacagtctaagctaattccgattggctgttttaaagagagcaggggtacgagtcggagtagcggagtgagtagtttggcgggaaggacagttaggaacaggtgactaaaggtgactcaggtcagtgcaggtgaccaggggtgactcaagaaggagcaggtgatcaggggaatagatgtgaactactgattagaactggtggaaaaggttgtttactgaaactaggggcaaggaggcaaagagaatgagaaagttaaactttaaaatggagaacaaagaacaggggacctgaatatactcatacattggttccttggagaggatctcagaactcattgtacttaacaatttacaggctgaaacatttgaaaaggaatttgttatatcctacaatttccccctttcaattttcatagtacttcctcttcaaactttttaaacatgtcttggcttagctgctcgacttaatcctctaaaagaaaaagcttatctgaataaggtggaggtgagttaaggaagattttagtaagtgctgcttttataagtctttgcactagcccacagatgcatggtatgacataacacctaacaagaatgagtacagctattacggctgcaagagaagtaagaattgaggctgtgatttctttccatttactgaaccccctttctagccaccctgagaaagggttatcgactccagaattttagctagttcattggatagagtggtaagtctttataaggcccttgttatgttcccagtgtgggcagtgttatttgggataaaggtacaacactgagttttaatcataatacaaacaccactttttctgctaatatcatatctggtgccattctgttttcccaggccatctggctagtgggccccaattgttctgctatccctttgacagcatccctggtgtaattaataaactgctgctgattataatagatgtaatttatccagtctacatttttattaatcgtcacccatgaaaatattgacttaaatcctgcagctatttgatctcgggctttaaattcatctggtactcctagtggaactccagtaatgtttatataaacatgggggtcaaacgactcatgtaaggcacttcttttacaattttcttttttatcatgttgacggaatgctagagtgaaagggatggccaattggactagagcacgagtgctgctctaattgcttggcagagtatccagcaatagtgcccctcaatgccaccacacacctgctcagggatgaacaagggcagactgatgggtaagctcttgaaaaggcttggtttcaccgcaccctgttaagtctccaaggaatgctaacttttccccctgccgtgaaagggacaggtgaacttaacatcaggggctggaggctggatggccctccgggctgacccacagggctcttgacctcggggaagagcagtgaaagcgaacagcagtgaaagagttttgcctgactcattgccccggctgtggggttctggaagagagctaccatacagctcatgccctgtccatgagaggaccactcgaggggaaaggggacaatttgggtctctggcctgcctgtcgcacaagcagtcacttttgtttagcatgcgaacagaatatttaatccatttcagccaagcatttacatcctggtactctgtttcaattgctatagtttgttttaaatctataacttctacaacagctactttggttttatcattgggtatataacgaaagaagatctggttagtggagaacttaggagtgggagaagggggtgcaggagttgaggaggcaatgaagcacatttcaaaggatcctctggggtccttccctgagacttctgctcctataccatagaaacggtactctggggagcagaggtggtaatctgtactggattacattggttcatctgacaatggggtggtccatccttgctccttggtagtccataagccattagaccagctaaaagttctgttctaggagggcaagattcctagttcatactgggaccatcatcaatatcttcccagactaactgatcccagttaacagattttcagtctgaggagagccaggaaggacaaagatacttttctgaaggggagagttgcctctggtttggcagatctccacaggtcatcccaaggcaagcatcaaaagtaatagtttggggcgaacttgttacataaagaacgagaagactagcaatagaaggggaaaagaaagagatggaatgtaagaggatcaaacccgttttagctttagcttggttggagttggccctggaatagctgtccatgattctggagggggtggtgctcttttgacctaggtgtgatgagtccatcctctttctgctgtttgaactgtggtctcggtggttagaagcaacaggtagggtccttcccaagccagttcgagtttcccttccctccaacttttgacaaggacacagtccttaagctgatgttggtgtactggaaactgtaggggtggtacctgttctaaaagacctttagttctgagggaagagaaagtggaaaataaaccaagtatataatttctgagaaactcatcttttgttttgaacataggaatgtcagcagtggagtgtaaacagggcaacctacacaacatttcataaggggataagccaacatctctctgaggagcagttcagactctcaagagggcaatgggagagcatctatccatggcaaccgagtctctaagactaatttggttaggtggccttttttttttttttttttttttttttgagagggagtctcgctctgtcgcccaggctggagtgcaatggtgccatctgagctcactgcaacctccacctcccgggttcaagtgattcttctgcctcagcctccctagtagctgggactacaggcacgcgccaccatgcctggctaatttttgtatttttagtagagatggggtttcaccatattggccaggctggtctcgaactcctgacctcgtgatccacccgccttggcctcccaaagggctttttttttttttttttgacagggtctctctccgtagcccaggctggagcgcagtggcgcgatctcggctcactgcaagcaccgcctcccgggttcacgccattctcctgccaaagggcttttttaaaaaatagtttggttcattctttccactcttcttgatgaaggtaggtgccagggagtatgatattcccatgttatatccagtatctgggctaatttcttaatgacatgtacagtgaaatgagtcttattatctgaatcaatgttttctattaatctaaacttgagtataagattttcaactaatgccctgtctatgttattatcagttgtacttgaaaaggaaatagcttctatccaatgagtaaggtgatctactatactaataaatacttcagatgatcagttggaggcatctctgtgtagtcagtctggatactttggaatggccttaagcctggactccttcccccaaggggtaatgttttactaaacaactgtctgtaacctgtttggccagggtataaatcctatgcacccataaactctgatgaatgtgtcacacgaggcttggggcctccaatgggtcctttaatgcagttggaataagacttccctcataaggggtttggataacatttctctctggtctagcaatatccattttccttctgaattctctttagcacctatttttattagtttttaaaccaaagaaagccaaacaccattttatatttgataatgcttcctgtgtgattttataccagataagctaaatttcacctttatattagtgtgctattaatgttaaactcaattttaataaaatcttgtagacatatttattcaattttaatgtctgaccataaggtaaaattgttatagactctttctaacgcttcataatttttgttaaagagcaggttagtactttaagaaaaacctgttgtgcttttattttaatgtccagttcacagaaaaactggatgacacccctttaactttagccaatatgtttacacacagaaattcctttacaattaacatttcaaaacttgcttaaaccttcaaaacaattttttaaccttttaatgtaggtaaaaatccacattcttatgccttcttataatccttttaccaaaagtatattttactttccttacacgccttgaacataaactgtttcttcaatagttttacattcaggaggcctaattacttttaaattatacaacatttcttgcataaattcccttttataacattttccacgactttcacagaccatctttgacatgacttaaatttctgacttgtgaacattcctttctttaaacaaccagttaatttattttaggatgagaatttaccgtataagattctttttacataaattctccttttttcttaatgtcaaagatgataattgttttttcccaaagcaaacttccctcatgtctgtggactagactgcctaaggccacaagattagaagttaggataatacatgttacactgttaacttttagcaaattttacttctgttgaaaaccttgtaagtttggaattttaattaaaggaaggcttttttggtgtccggggacatggacaatagttatttttttggcaactgaaggttatttaatacttgggtgattaattcctcgtggaccgggtcttgacctttgctattaataagacctggttcagtccaaatttttccacatgcatgagccactccaaaggcacactgaaaattggtatagatggttccttcctggttctgtaagtactttaaggcttggctgagtgcaaacagctcacacgtttgagcagaccaattattaggcaattttcctaactctatctctacacctttaaccattgttccctatttctcattcaaacttggacataacggtatgtgaaaaagagcctcttgtgactgttacctctttacaatggaatgttaagcaacccctcagaaagtagggagtagcaaatcaaatctttgtaactacatttcagcctttgccggttgaaatgtcagagccccggcatcagaaagtggtcaactcaagggctgataagaagaatttaccaacaacagtataggtttgaaaagtaaagttttattagaaagaaagaacattgcagaagagtgcagcgaggtgcctcagcaagaggggactgagagggctgtggtggatattccttaggcgcatatatgaaccttaaggcaaaagcttgagggtaatttggagcatactagccacgtaggttatgataaatggttacatttgtagttattttggtgccttaatgtcagcaaggattgcacagtgagtttcgcatagaaattctggttactacaaaatttttgaaagacccctggaaccagatgccaactttagatatgtcgatgaagagtcaaactctgtaaaatatttgaagagatttattttgggcgaaatacgagtgaccatggcccatgacacagcacttaggagatcctgagaacatgtgcccaaggtggttcgggcgcagcttggttttatacattttagagaggcacgaggcatcaatcaaatacatttaagaaacacattggtttggtccagaaaggtgggacaactcaaagtgggaacttccagactataggtaaatttaaacattttctggttgacaattggttgaatttgtctaaagacctgggatcaataggagggaaatgtttaggttaagataaaacattgtggagaccaaggttcttttgaagtcttatagtggctgtccttagagacaatagatgacaaatgtttcctattcagacttttaaaagctgctagactcaaaaaaaaaaaaaaaaaaaaaaaaaaaaaggctgccagactcttagttaatctcagagggcctggaagaaaaagatctagctatattaatagagattatttacagatgcagatttccccccacaaaggacagctttgcagggccatttcaagatatggcaaagaaacatgtttttgggtaaaatatttttgctttcttctttgtcacataatgttatgccagagtcagattggaaagcaagtcagatatataggtttaaataaaacccatctgatgagaatttatggtttgtagggcatgactccccagaccccttagataggaatttcagcaaaataaaaagatcagagcttagtcctcataatcaagaaataaccataaaaatgggcaaccctatggagtagccattcttttattcctttactttactaataaattttcttttgctttgcactgtgaacttgccctggattctttcttgtgtgagatccaagaaccctcttgtggggtctggattgggacccctttccggtaacgattatacttctaaattcctcagataaggagtttttgtctcgggctgcttcagggtcaccaggtgatttttgctctcctcacccctttgttcagcttctctgtttttgcctatgtacacaactctcagatttggccactggggagagcaaagttatacctggtgaccatcaagcagaccattcagagacaaaactccttatcagaactccttattcagaagcaattagacttccctattatctaaagcaggcatctcattccaggcttctttcccccaaatttataagtaactagaatttctatgcatctctggaatgcatgcatatcaaaactcacggtgctgaaaatttgcatctgtaaagaatctctattaacatagctggatctttttcttccaggccctcccaatcctgaagagattaactaagagtctaacaccttttgatggtctgaataggaaacatttgccatctgttgtctctaagggcagcgaacataagacttcaaaagaaccttggtctccacaatcttttatcataacctgaacatgagtctcttgctgatattaaggcattgaaaccacctttgcaaaattattacagacagcatcattgcaggaatccaggacactggagtagaggatgttccatacctttgggttacaagccacccccaggaccttgtcctcattgcaaacaagagggtcattgtgatatggaaggggggcaggggagtgctgggtacagaaatgcagggttcctggtgagggctccacccttgggcctgtgcccacagacctaagtaagaacaggcactcctgttttcatgcctgaatgttgtattttccaagaccactctggcccaccacatccccttcctgtgtccatattgttaaatatgaattctaaatttctcttcaaagaattaatatgtcagtatgttcaattctttgacttctgcttttaaatttaacttcctcgtaaagcaacctttttcgattacctgctccaccctgactcattccgattacctgctccaccctgactcttgcaggttacttgctacctgctccaccctgactaattattctccaccctgcataaccatttttttttcccgccaaagcactcatcctgtcacactctttaaatctgccaattggaattagtttagcctgtgcagtctaaccctagccaataggggaacgacacagcagcaggagccttgtgcattagggataagaacccctttccctcccttgtccaggtgtacactcaccattgctctacctgtgagggtgcacccttctatagaagtaccttgccttgctgagaattaaaaagaaaattttatattcgagtgctatttcttttgcggcactgaaactttatatgtaacaatttgggggctcgccctgattacatttccctctggggcagtctctggttctctcttgtgaggagcgctccgccccctgtggcggcctcagccgggagaaatcagaacccacccagtgcgaggaacaacccgagctgtcagcaacaggggggaagaaaactggccggcaacctagcttaaagaatcctcacatactgcagcgacgactctgcgcacagagcaaggaaggagaagccgcgggagctggtaaagtatttccttggtggtcgggaccaaggtaagaaagccacgggggtggtgggcggtgaagtactccttggtcagggtggcttagaggttaaaaagaggtgagacatccccattggcggagattgaacctcacacaaacctccagtagtagaaaaggcaagaaatttccagtggggaaattgagcctcaccccaaaaggtaagaaatttccagtaagggaaagtgaaccttgaaccttatcccaaaaccatcaagatgggaaatatcccaagcaagacagggagcaagggggataaacatggtaacaaagatatccctccagatggccccctaggtctcatgctaaaacactggaaggataatgaaaggatacacataggaaaaagcaacaaatggtaaaatattgctgttttatttggagtcagggacccatcctcagtccctcaatcttctggtcaaagtttgggtcaaatgagaatgtaatgtgtcagcttctaatccgatacgttaatgataaaagtccagtgtctcaagaagaactaggctatgccctttgttggaggcaaggacctgccctcctatttctcttaaaaataaatagggaagaacccaatctggcacctcaaaatgaaaagtcagaggagccagctctcatgcctaaagactccagtgctgcatggtatcccctagaccatcttcccccactcagtgtccccaaactttcccctcagacagccactgccacctcagatcaccactgccacctcagatcctgttccaaattccccctctactcacgctatccctcctccttataaccctgactgttgggaattaccatcccaccagcctgttctctcccaacctaaagacccctctctaaaaagactccagcgtgaggtagaacaatgtaaaaaagatattcagaatttcctatttccctccgtacctaagaggtcagcccctaccctcttccctttgaaagaggtaccacaagttgggggcgggggggggggcattgactttgtaaatgctcccttaatcagttcagaagtccagaattttacaaaggagcttaaactgctgctggacgacccttacagagtggcagaccaaattgaccaattcttagaacctcagttatacacttgggtcaagttaatgtccatcttgggcatcctcttttcagggtaagaaaggagtatgattcttaggtctgctatggtagtttgggaatgtgagcaccctcccaatgaaaacgttcctaccacggaccagaaattccccgcccaggaccccccatgggaaaataacaatgcagatcaccgggaaaatatgcaggacctaagggagataataaaaggaattcaggaatcagtaccctgaacccaaaatctttctaaagcatttgatatacaacaggaaaaagatgaagggcctatgagattcctagacagactgagggagcaaatgaggcaatatgcaggcctcaatttggatgatccccttgggcaaggaatgttgaaactccaatttttcactaaaagttggccagacatttgaaaaaaaaagttacaaaagatagacaattgggaagaccatcccttaagtgagcttctcagggaagctcagaaagtgtatgtgaaaagggacaaagtaaaacgaaacaaaagacaaaacttatgtttttcaccttccaacagatggctccaaacccaggtacttctagatagagtttccagggagccagaaactataaagggtccgaatcctcttttaaagaaccccagcctccatctggaggaccagggtccttgtctaccaagccccctaaagagtatgggggagaagggttaaagaatcccagaactaaggggaggaaggacaaaataggtgctatagatgtggaagagcagaccacttcaggagaggatgttctgaactaagaaaggagaaagaagccctttcactcatgactttcaaggaagaatagcggggtcaggggctctgtctcttttatcttgagtcccaccaggagcccttgataaatttgggggtgggacctaaacatgagcttatcacctttttagttgattcgggggctgctcgctcctctgtttccccccatctaatgttgtctccttcttagaggaacttttagtctccagggtaaaaggtgtaggattaagagcaaaaattttagaaagcactgaagttagataccaggatcgctcagcttatattcagttcttgtttatccctgaagcaggaactaatttactggggaggaatttaatgttaaagttgggcataggtctacaagtcagcccaagaggattcctcacctcattaaacctactcaccaccgcagatgaaaaatatattaatcctcatgtcttgaccaaagaaggaaaccaagggaaactctaagtccctccgatccacatcaagctaaaaaacccaggggaagtagtaagaaggaagcaataccctattcccctagaaggtaggatagtgttgaaacctataattgaaggccttatttaggatgggcttcttgagccctgtatgtctccttataacatcccaatcaagaatcaagaaatcaagactgctaccagccagtcaagaaattagatgggtcataccagctagtacaggaccttagagctatcaaccaaatagtccagagtacccaccctgttgtcaccaatccttacaccattcttagcaagattccatataatcatcaatggtttactataataaatttgaaggatgctttttgggcatgtcccctggctgaagatagctgagatatatttgcttttgagtgggaggatccatactcagggtggaaacaacaatatcgatggaccgtcttgccccaagggttcacagactcccctaaactttttggccaaattttagaagaagtactagaaaaagttgtcatcccagaacaaatatgccttcttcagtacctggatgacattcttatatctggtgaagatctagagaaggtaactgacttctctacacatattcttaaccatctgcagtttgaggggctatgagtctcaaaaagaaagcttcagtatgtagagcctgaagttaaatatttaggccacttaataagtgtaggcaagcgaataatagggcctgaatgaattgagggaatcgtgtccctacccttgcctcaaactaaacaagaactcaggaaatttttagggtcagtcagacactgtcgctaatggattgactcatatacactgccccgtaaactgttctatcaaaaacttgcccaggagaagcctaaccgtctcctgtggacttctgaggaagttgatcaaatcgagaggttggaggaaaggctcataactgcccctgttttaggcttaccctccctagaaaagccattccacctttttgctaatgtggacagtagggtaccttcgggagtgctgactcaagaacacagaggccgccagcagcccgtagccttcccatcaaaggtcttagacccagtcacttgtggatggcctcaacgcatccagtccatcgctgctatggcaatactaggtgaggaaagcagaaaattaaccttcggaggaaaattgacattaaacacgcctcaccaagttagaactatcttaaaccagagagcagtgagatggcttactgacttgagaatcttaaagtgtgaggccattctgttagaaaaggatgatttaacattgaccactgataattcactcaacccagcaggtttcctaacagggaatccacatctaaggagggaacacacatgtttagatttaattgattaccatacaaaggtttgaccagacctgggagaaacccccttctggactggacggcacttactcatagatggttcctcccaggtgattgagggaaaaagacacaatgggtattcagtgattgttggagaaactcttgtagaaataaagtcaggaaaattgcccaacagttgatctgctcaaacgtgtgagctgtttgcactcagccaagccttaaagtacttacagaaccacatctatacagattccaggtatgcctttggagtggcccatacatttgggaaaatttggactgaacgaggtctcattaatagtaaaggtcaagaccttgttcacaaggagctgttcacccaagcattgaataatcttcagttgccggaagaaatagctattgtccatgttcccggacaccagaaaagcctttcttttgaaagttgaggaaataacctagcagatcaggtagccaagcaggctgctgtgtcttctgaaatgcgtgtttttcacttaactccctacctccctcctcctaccataatccccattttctcttccaccgaaaaagagaaactaataaaaataggtgctaaagagaattcagaaggaaagtagatactgccagaccagagagaaatgttgtctaaaccctttatgagggaagtcgtatcccaactacatcaggggacccattttgggccccaggccatgtgtgacgcagttctcagagtttatggttgtataggaatttataccctggcaaaacaggttacagatagttgcttagtatgtaagaaaactaatagacatactataaaatgattacctctcaggggaaggaatccaggctaaaggccattccaaagtatctaagttgattacacagaaatgcctctgatagatcatctaaaatatttactagtgatagtaggccacctcactccctgggtcgaagctatccccttttcaaatgcaacagccagtaatgtagttgaggccctaattgaaaatatagtacccaggtttcgactaacggaaaatactgactcagacaatggaactcatttcaccacacacattattaaaaagctattccaaaatattagacattagatgggaacaccatactccctggcacccaccctcatcagggagagtagaaagaatgaattagactctaaagaaccacttaaccaaattagtcttacagacttggttgccatggaccaagtatcttcctatcaccctgctgagaatttgaactgcaccatggaaagacattggtctttctccttatgagatgctctatggattaccttatttgcactccactgttgatattcctacctttgaaacaaatgatcaattccttaaaaattatatacttggtctatgttctactttctcctctcttaaaactaaaggtctattagcacaggcaccacccttggagttcctggtgcatcaacattagcctggggatcacgtcctcatcaagagctggaaagaggagaagcttgagccagcctgggaaggtccttacttggtgctcctaactactgaaaccgcagtccgcacagcagagagaggatggactcaccacacccaagtcaagaaagcaccgccccctccagagtcgtgggccatagtcccaggggaaaaccctactaaactaaagctaagaagaatttaactccctttcatctattctattactcttttttctttcctcactctattgctgaccatatagttattaacataaccaagtcaatttcacctcaactattgcatttgatgcttgccttgttatatcctgtggggatttgtcaagccaaagaaagctctctacttcagatacctctgtccctcctggctctcctcagactaggcattagtgaatcgggaccatttaatctggggagatttctataaagatcccagtggcaaccaggagtcttcccccagtgatgtagagcttttaagccatagttggtccaaagttctgtggaccattaaagagcaaggatggattgccccaaccagtttttgtaatttcctaaattcatacattcgttttactaaagggacagtgcccactaactctcagctaaaccagtgcaaccctatacaggttattattttgagcccacaaaattcttcctcttttctaagctggttcccttctttaagccagttttatggtatgggggctgaagtttcagggacagaccctattggattctttgaaatgcacttctttgatcccctgctgtctgcacctgcctctgagcctttttccaaaacctctcacaacggaaccattgttcctcctctatctaacgacaaggccaagatagcgatggtagaagttaaagacttaaaacaaactggcaattgagacaggataccaagatgtaaatgtttggttggaatggatcaaatatttcatccacacgttaaacaaaagcaattgttatgcttgtgcgcacagcaggccagaggcccagattgtcccctttccactagggtggtcctccagttgaccgggcatgggctgcatggtagctcttttccaggattctatagcctggggtaagaagttgtgccaagctctctctctgctatatcccgaagtttgacaccttgtgggtcagcccccaagggccatccagcttccatctcccaacactaagtttacttcgtgtctctcatgacagggaggaaacttagtgttccttggagacctgaagggatgcagtgagcttaagaacttttggccaggcgcggtggctcatgcctgtaatcccagcactttgggaggccgaggcaggcggatcacaaggtcaggaaatcgagaccatcctggctaacacgatgaaaccccatctctactaaaaatacaaaaaaaaaaaaaaaaattagccaggcgtggcgtcatgcgcctgtagtctcagctacttgggaggctgaggcaggaggatggcgtgaacccaggaggtggagcttgcagtgagccgagatcgtgccactgcactccagcctgggcgacagagcgagactctctctcgaaaaaaaagaaaaagaactttcaaaagcttaccaatcagccagcccttgttcatcccctagcagaagtgtggtggtattgtggtggacctttactggacactctgccgaataactggattggcacttgtgctttagtccaactagctatccctttcaccctggcatttcatcaaccagaggaaggaaaaataagacatcgtaaagtgagagaagccccttatgggtctttagactctcacttctgtttagacgcaattggggtcccatggagaatacaagatcaatttaaagtctggaatcaaatagctgcaggatttgagtcaatatcttggtgggtgacaattaataaacatgtagattggataaactacatctattacaaccaacagtgatttagtaactacactagagatactgttagaggaatagctgagcaagtaggggctacaggccagatggcttgggaaaataggacagccttagacatgatattagcagaaagaggaggggtttgcatcgtgactaaaactcaatgttacaccttcatcccaaacaacattgcccctaatggaagtataacaaaggcattgcaaggtctcactgctctatccagtgagttagccagcagctcaggggtaaatgatccctttacaggatggctagaaaaatggttcggtaaatggaaaggaataatagcctcaattcttacctccctcgtagctgtaataggtgtacttattcttgtcgggtgctgtgtcataccatgcatccgtgggttggtgcagaggctcgtagaaacggcacttgctaaaacctcccttaactatcctccaccttatccagagaagcttcttcttttggaaaatcaagcagaacaactaagtcaagacatgttaaataagtttgaagagaaagccgtaagaaaaatgcaagaggaggaagttgttaaatatgaattctaaatttctcttcaaagaattagtatgtctgtatgttcaattctttgccttctacttttaaacttaatttcctcataaagcaacctttttcgattacctgctccaccctgactcactccgattacctgctccaccctgactcactccgattacctgctccaccctgactcactccgattacctgctccaccctgactcattccgattacctgctccaccctgactcattattctctgccctgcataaccattattttcccgccaaagcactcaccccatcactctctttaaattagccaatcggaattagtttagcctgtgtggtctaaccctagccaataggggaatgacatagcagcaggggccacatccttcagggataagaacccctttccttcccttgtccagatgtgtgctcaccattgctccatctgtgaggttgcacccttttatagaagtaccttgccttgctgagaattgaacagaaaattttatattcgagtgctatttattttgaggcacagaaactttatatataacaatataaacccgagaccttggcgggcacacacacaagcagctgaatgtcaagaggagtggaggaacggagtggcagagaatggcagagagcgctggagagtggcagagcagcatggcagagagggagggaagaggcgtctgaactttggaagacacctccactcctcaataaagtctccgcatgtatcacttttcaaacagttcatgtgacctgattaatccaggatgccagacaagaatctggggaagttaacattcaggcatccctggatggcaaggctaaaggagcacactgtaacatatgcccacttgggctccagcacctgtccatctgtgtgttcccccttccctcaggggtttgagcagtggggtgaccaaacagacgagccacaccccctgttgcatgtcctgcaaggagaatcagggaactctcctgtttcagttggaagagcaagtgtccctctctctctcgtggtggggagacatctcttccttctgggctgtcacagccccaacctcaccaacctacctgacaagggagtctggcagaacaagggcaagggcagggagaagcacctctaactctattcctggataataatcaagtctctaaaagtcatcctggagccgggcacagtggctcatgcctgtaatcccagcactttgggaggctgaggcgggtggatcacctgatgtcaggagttcgagaccagcctggccaacatggtgaaaacctaactctactaaaatacaaaaaaaattagctaggcatggtggcaggtgcctgtaatcccacctacttgggtggctgaggcaggagaatcacttgaacctgggaggcggaggtcgcaatgagctgagactgtgccactatgctccagcctgggtgacagagagagactctgcctcaaataaataaataaataaataaataaataaataaataaataaataaataaagtcatcctctagggctttgaggccgttcaagcccctattttttccatctctgtggatgagcctctgttaaatctgattgtggctgaacaagagataatgttcctaatagatacagggaccagttattcagctttaagtgtttattacagcccaatgtgctagtcctccatttcattacgggtattgataaacttcagtgaggctgtttcacactgccactcccttataaaatgaaaggctattcctttacccactcttcagtcctgccaagctgccctgtttctttattaggtcacaatttgctcacaaaattacaagcgaatttacagttaagacctcacattctagctgtaattaactcacacttcaccaaaaaagttgctgcagtctatagaacatcacattttaaaacaagtgccggccaggcgcagtggctcacgcctgtaatcccagcactttgggaggccaaggcgggtggatcacttgaggtcaggagtttgagaccagcctggtcaatatggcgaaaccccatccctactaaaaatacaaaaattagctgggcatggtggcacacacctgtaatcccagctactcaggaggctgaggcaggggaatcacttgaacctcggaggtggagattgcagtgagccaagatagtgccattgcactccagccctggcaacaagagtgaaacgctgtctcaaaaaaaaaaaaattgttcttttgtttgcttttctttcaccctgattcctccttccccctttgccgtcttcagtaccaagctacaaagctaggggtggctgaggacagtaaacagagtgtggtcttagctggctttttccctcctgggaagttgttgtttaggatcctaattctagttcagaggtgcattctaaatagtcttctccattgcctttccccccaaaattaatctcacacgttggcttgtgtgtgcattcacgtgaggaactgaactgtcattttcatagataaataagagactgagtttccttagctccaaagagaaagggcattttgctcctcccagcagaaaggtacccgagtgactggggggccttgcgggagtgttggggggttgagcccccagcgacatgaagtgattctgcagggaactcacaacaaaattagttttaaaaaggctcgtccaggaagcacatataggaactggtcactctgagttttgagccctcttggaggtgctagacctccggagaaaacactgagacacctaagagggtggtggcaaggattcagtggtgacacactgtggagtctcatctgcaaccattacacttcgacctactccacaaaaaccctaggccacagctcagttactccttaaaagaaagtgggaaacaaataatctaagaataaggaaaaacaaggtgttgacgaaaagagttaaactgtgtaaaatagttgaagatatttattcagagcccaatatgagtgactatggcccgtgacatagcccttaggaggtcctgagaacacgtgcctaaggtggtcggggctcagcttggttttgtatattttaggaaggcatgagacatcaatcaaatacatttaagaaacacattggtttgattcagaaaggcgggacaattcaaagcaggggtcagggtgagggtggcttccaggctataggctataggtaaatcggtaaatttaaactttttgttttgttttgtttttttgttttgagacagagactcactcttccacccaggctggagtgaagtggcacaatctcaactcactgcaacctccgcccccatgggtttcaagtaattctcctgcctcagcctcctgagtagctgggattacaggcacccaccaccacgcctggctaatttttgtatttttagtagaggcagggtttccccatgttggccagagtgatcttgaactcctgacttcaggtgatccaccggcctcggcctcccaaagtgctaggattatgggtgtgagccaccttgcctggtctaaatttaaacattttctgattgacaattggttgagtttgtctaaagacccgggatcaatagaaagtaaatgtttaggttaagataaaagactgtggagtccaaggttcttttgaggtcttatattggctgcccttagagacaataggtgacaaatgtttcttattcagacctttgaaaatgtgctagactattagttaatctcttcaggattgggagggcctaaaataaaaagatctagctatgctaatagagattctttacagttgcaaattttcccccacaaagtacagtttggcaggaccatttcaaaatatggcaaagaaacatgttttggggtaaaacaattgactttcttcttggtcatgtaatgttatgccagagtcagattggaaagtagtcatcatatataatgttaaataaaatccatctgatgagaatttatgatttgtagggcatgactccccagaccccttagataggaatttaggcaagatagaaaaaatcagagcttagtcttctcacaagagaatgaccctcttttaggtaccccattgattttacggcatctctactttgcaagtgtttgtgtaaatggacatattatggtctctttgtgcacaattatgtcaaagacaatttagagcttgaaggttgacctccagctgtaaagttcctaagttctctatctctctgctttcttttctgcctgttttaagtctgctattatttttctttctttttttgagacagagtcttgctctgtgcccaggttggagtgcagtggtgcaatctcagctcactacaacctctgcctcccaggttcaagcagtcctcccacctcagcctcctgaatagctgggactacaggcatgtgccaccactcttggctaatttttttttttttttgagacagagtcttgctctgttgcccaggctggagtgcaatggcatgatctcagcaaaccaacgagtttctattaatatctcatggctagagttctgagataatagctataggatctttggttgtatgagtatgtatgtgtgtgtttatgcatacatacacttatttcattgtgttttctagccacaggtactgaattggcttaaagttaaagaatattcataaattaataagcctaaatgcttttcaagttcatgtgacttaagtaaaatctttaataagctagctttaaaattattggtaaagtaatattagaaatgtcttaaaaattgttagcataaatttttgtttgcatttattgatcaagggacttcatatactgccaaatactgtaaggtgtcaaaatttggcatagggtttgtaaaactacaaaaccgttcaaaacagaatgatttttgcttttgtaatttttgataaataagacattgatattggtttaatgaaaacagctaaatcatgaattatttagtgaaataacaatatatttaatcttaaggtttttacttagcaaacacctgaaattcacaggctatcaaatgtttgacagggaaataactttaaatgatgactatcacagttttcataactaacctgggtaaactattaaaataaaatatttaggtaaatgtaatgggataaatacttgtagacaaagttgtcataatttaggatctaaagttatgttaaattaaacaatagatatttcattaactgggtttttttaattaaaaaagatattgcaggaaatcattttttttctaaaaaatgtgttcttgttaaaaggaggataatttttgtctaattcaaagcttatttaaaggttatatataaaataaggtaaaaagaaacaagaaaatatataaagaagttatagaaataaaaaagaatttttggtaagaaagcttaaagaaaaataattttacatgagaaagaaccttgtatggtacatttttgtcctagaataaaatgactggttgtttaagaaagaggaatgttcatacaaaccagaaagtccaagcatgtcgtgaatggtctgtttaagttataataagagcatttatggaaaaagacccacaaactttcatataatcaagttgtctataattaaagggaaattatttataatgatcttttgagagattgggttttgatattaaaaaacatttatacactaaagaattcattagaacaacattttcttaaggtattgatttacttttaataaattacaagactatatatataatatattttttcctgcaaagttcaacttttattgcatctcactgttttcagctttctctccccttttaaagtacctgaaataataactctatctttcaactcatttttagctcctgtaagtttttttattttctcctttgtgttctaactgttgtggcctgacgctaataaatgttttatctttgtggtctaaaggaaacattccttccaacataatatttcctgtagggaacagcggttgaaatgcagaaggtgttttgttttccctttgggaaattggcctaataaacagagtttatgctttattgaaataattcctatgtcattattactaagttttggtttgtttagaaaaaaacccgagattaaattttttttaattaagattattacatacatgtaaccctctgtatgtgcttttaaagtccttgtgccattaagttacagagctttgagtccttggtctaaaaagaacaccaagtcctgctaaatattaaacactgacagcagttaaaacctcattttctgacctggtagaagatgccaatcaaaataaactgtgttcatgagacagaaggccggaaattaaaacgattcaactcctcaaggtctggagactatcaaagaagaggtgggtgcatgagattgtaagggccgattttgagagatcaaatgattataaggccaattttgagagataaaataattgagtttctctataaattaaccattaatctcaaaggcacactgatgcaagactagcatatgggctgctgtgtcacgttaacaaggttttcttggagaattaacccactccttaataaaaggttataaaagaggttataaaggttataaaaaaggcttgtggaatttttatcttgtggtcaggatgattaaaattttatagattgtttatacattttgaaaaacaaatttaattggcctcgtttttattagggcttattgtttaggcaattaagtcttctctctcaaagaatcaaggtttttgccttttttttgaaatctttgagttatcaagttgagtaaatgaaagacttattttacaatgacttgatctgtgatcctattttgtgatatcaagcattttatttatttatttatttatttttgagatggagtcttactctgttgcccaggctggagtgcagtgctatgatcttggctcactgcaacctccacctcctgggttcaagcgattctcctgcctcagcctcccgagtagctgagattacaggtgcctgccaccacacccggctaatttttgtatttttcatagagacagcatttaccatgttggccaggctggtctagaactcctgacctcaggcgatccacccaccttggcctcccaaagttttgggattacaggtatgaaccactgtgcccagccaaatcaagcattttaaactttttatttttatttttaaaattttaatattttgagatggagtctctctctgtcactcaggctggagtgcagtggtgcaatcttggctcactgcaacctctgcctcccaggttcaagcaattctcatgcctcagcctcatgaatagctgggattacaggcacttgccaccacacccagctaatttttctatttttagtagtgacagggtttcaccatgttggccaggctggtcttgaactcctaacctcaggtgatccacttgccttggcctcccaaagtgctgagattacaggtgtgaaaggtgtttaaaggccactgtgcctggcctttaaactttttatatttgacaaactttccaaagtcaaattctaacttggttcctcaatgattttttgatattagtcccctgaagtccaaaagagacacagtcagcttatttggcataaaaatcatacaggaagcattgtcaaatatgtaatagtgtttggctttctttgggctgtatttgtataaatatgttattggcatatgttccaaaattatgggaaaatcctataattatgaatgacttagtatatgttattaatcattatcattattatgtaaaattattgtatgctacagaagtaaccaagtttctttgtcaattgtgtctttaagtatgacttttctaaaacttttgtcatccacagttgttttacttttatccttttcaaaaggatgattttacaatcagcataggactctgacagttgctgttgaatacaggttttggagatagtgacactaaaatagagaaaaaaaatccaacactcccatagagagctgaaatatacatgaatagcaagcagaagaggagttaactgcatggactgaactaatagaagactgaaataatccttctatgactttttgcttaaaacattgctaatcctttctttgtttttcagagccaagaaaacatttattttgagcttttaaaaaatttattattattattattattaacaaataaataatcttctttctttttttcttttatctttctctgcagggcaagttctgtatttatagcttttaacaattgaggaaattatactcctataaacaaaatttggagcatatttctctctatctggtttctctaaaatttggaaactagttgggagtattcttaacttatagcaatatagttatctgcacaagtacaataagaatctgttttcttttgtaagaggacataattggggacagtggtgattttaccaaggttttgactggaacaacatgctatcagatgcagactcctttaaggaatcaaagttgacttacagagctaataaaagcatcttgggaaagctggcctcctatcttgtctacacagtccctgtacaggttcctgacctgtggtaagtaaagagtgtcactttctaacaggcccaggagcccaaagtcttcctgaggtgaggaattcatccaattaatacaggtatttgcaggcacaggccgggcttaagacattaaagtcgaatgtgagattacttatggaataaagttccagcaaagccaattaaaaaaaaaacaaggagcctatatggcaaataattattcttgatgattttatgcaaatactccagccaaatataataagacagaaacttattttgcaaatgaattttgttctataatttgtcctcagtgaaaggggactggagagagaaaaaattatgtttcaaaatcacctatagtacacctgttgttagattttagtctcacttagtgtttttaaatttttattattttctatagtttggactaaactctaaaatttttcctggtcacaagtccccaaaataatttttttcattttttttcttttttcctttccttttccccccacattttttcctgattagaaatcaccaaacattaaactgtgctttcctaaagccctgtgaactaaagctagacaatctatttacatacataagctactttcatacctgcctactggtgtatgaacttcagagtaatatggcctatattgatttcccaggattattgttgttgttgttgtttttctcctttcctcccccattttctcttaggacgtgagacttcacaacctgctaaagcgagctttcctaataatgtggaacctacctgtctatgaataaactgtcctagtcatgagagatcagacaaaacctgagaccagaggctaattttcttctaaaatgcttttaaaaagaaaaggggggaaatgtgaaaggaaaataaacttgggaccctcaaatcactaagccaaaacgaaaagtcaagctgggaacggcatcgggcaaacctgcctcccattctaatgggatagctaaataagatagctacaaagattttaaaaagctacatacctccctcacaattttcccacaaggaaattccttgtgtacctagaacagacagaactcaaagtcatccctctgctcatgggagacaaatgcacatctgatggcttcctttgccctattgcttcgctaagccagactaaggcataagtgactattcctgcaagttgcatattcagtggagggctaatcagaaactcaaaagaatgtaacaatttgtcctttatctacctatgacctggaaaacccctccccacttcaggttgtctcacctttctggatggaattgatgtacatcttacgtatttgctgactgatgtctcatgtctccctaaaatgtataaaacctagctgtgccccaactaccttgggcacatgttatcaggacctcctatggctgtgtcactggtgtgtccttgaccttggtagaataaattttctaaattgattgagacttgtctcagataactcttgatttgcagtaagtagcatttctaaacatctctggaatgcatgcatattgaaactcattatgcaacccttgctgacatcaaggcaggaaaatgtctacaaatgtaatcatttagcgtgacctatgtggctaatgtggaccaaattatccttaagctcctgctttaaggtgcataaatgcccctgaggaaaaatccaccttggcactctccatcctatcttgctgagattcttgcctgcactcttctacagagttctttctttctaataaaactttccttttttcaaaccaatactattatccataaattcttcttctttttttgtttttttgaaacggaatctcactttgttgcccaggctggagtgcagtagcatgatcttggctcactgcaacctccacctcctgggctcaagtgagtctcctgcctcagcctccagagtagctgggattacagacgtccaccaccacgtccagctaatttttgtatttttagtagagatgaggtttcaccatgttggccaggctggttttgaactcctgacctcaaatgatccacctgccttggcctcccaaagtgctgggattataggtatgagccaccatgcccagcagtaaattctccttactaatccacgagtggaccactttccaatgctgaggctctgacacctcgctgggcagccacttttgattattttgggttgtcagggctcagggacacaagaacttgctccttaggggagctggaggtctagtagggattgcttgttctccatcaggcccctagtagggaggcctctcctgtccccaatccctgactcccagggatgctcccctccaaaccacagcaggaagttcctccttaggtcagacccacagccctgatgctgtggtctcactgcaggtcatagtctcacaggggcctcttatattattttaattttaattttaattaaattaaattaattttttttttttagatggagtctcgctcttatcgcccaggctggagtgcggtggtgtgatcttggctcactgcaacttctgcctcccaggttcaagtgattctcctgcctcagccacctgagtagctgggattacaggcatccgccaccatgcctggctaatttttgtatttttagtagagacagggttttgccatgttgaccaggctggtctcgaaatcctggcctcaagtgttctgcctgcctcagcctcccaaagtgctgggattacaggtgtgagccaccgtgcctggtcttatattattttaattttaaatttaagaatacattcttaatatcaaccttcaaagactccctgttgcttaccaagttaagaaaactacttaaacctcacatataattcctttctcaactgggaccaataaaccgtgacagctttattgaagggggccagccccttcacacctgtgggtatttctcgtcaggtgggatgagagactgagaaaagaaatagacacagggacaaagtacagagaaagaacagtgggcccagggcactggcgctcagcatacgaaggacccgcaccggcgccagcctctgagttccctcagtatttattgatcatgatctttactatcttagcaaggggagtgtagcagggcaacaggtggggagaaggtcagcagggaaacatgtgagcaaaggaatctgtatcatgagtaagttcaaggaaagatactgtgcccggatgtgcacgaaggctagatttatgtttctctttacccaagtatctcagtgtagcaaagagcaacagagcagtattgctgccagcatatctcgcctccagccacagggcggttttctcctatctcagaatagaatgaatgggaatggtcggctttacacagagacattccattcccagggatgagcagagaagccttcctcttatctcaactgcaaagaggcctccctctttcactcctcctcctcagcacagaccctttatgggtgtcgggctgggggatggtaaggtctttcctttcccatgaggccatatctcaggctgtctcagttgggggaaacgttggacaatacccaggctttcttgggcagaggtccctgtggctttccacagtgcattgtgtccttggttaacagagaatggagaatggcgatgacttttaccaagcatactgcctgcaaacatattaacaaggcacatcctgcacagtcctaaatccattaaactttgatccaatacagcacatgtttctgtgagcacagggttggggataaagttacaagttaacagcatctcaaagcagaaacaatttttcttaatacagatcaaaatggagtttcttatgtttccttttctacatagacacagtaacaatctgatttctctttcttttccccacactttctcacgtgttctttctttctttctttcttttcttttttgagatggagtctcgctttgttgcccaggctggagtgcagtggcgtaatctcagctcactgcaaactctgcctcccaggttcaagtgattctcgtgcctcagcctcccgagcagctgggattacaggcatgcaccatgacgcccagctaatttttgtattttcagtagagacgggtttcaccatcttggccaggctggtctcgaactcctgacctcaagtgatccacctacctcagcctcccaaattactgggatcatatgaatgagccaccatgcctggcccatgtttttcttgtactttaggctttgctacttacaaccagaactgcttaccattctgtcagaagccttccaaccagggcaactccatcttgaataggggctgggtaaaataaggctgagacccactgaactgctttcccagaaggtcagacattcttagtcacaggatgggataggagtttggcaggactggtatcacaagtacaggtcacaaagaccctgctgataaaacaggatgcagtaaaagaagccggccaaaatccaccaaaactacgatggggatgaaagtgacctcgattcgtcctcactgctcattatataggaattataatgcattcgcatgctaaaagacactcccaccagcaccatgagaatttaccaatgccatggcaacgtcaggaagttaccctacatggtctaaaaaggggacgaaccctcagttctgggaattgcccatccctttcctggtaaaacaatgaataatccaccccttgtttagcatacgatcaaggagtaactataagtatgttcagctgagcagcccatgccactgccctgcctatggagtagccattattttattcctttactttcttaaataaacttgctttcactttactctatggattcaccccaaattccttcttgtgtgaggtccagaaaccctgtcttggggtctggtttggtacccctttctggtaataattctgtaagtatttgtagtacgtctgagccaccaaaatttccatactgatccttccattagaatatcctttctgcctgtctctttctggcaggatctgatccatatttcaaagccagtctcaaatgccaccttttccaaagaaacctatccttatatctttatctaatacaaacagtatatattgggagcctaagaaatgcttgttgcatacatcaatgaatgaaccccaaaccaatgtatttctcccttccttgtaatctccagaaatgtttataaactttgttgttgtttatttgtttgttttatttttatttttattttgagatggagttttgttcttgtcacccaggcgggagtgtaatggcgcgatctcggctcaccacaacctctgcctcctgggttcaagtgattctcctgtctcagcctcccgagtagctgggattacaggtgtgcactaccatgcccagctaatttttgtggttttagtagaaatggggtttcaccatgttggtcaggctggtctcaaactcctgacctcaggtgatccacccgccttggcctcccaaagtgctgggattacaggcgtgagccaccgtgcccggcctgttgctatttatttaatatactttatttttttgagcgattataagtttatttttatttatttatttatttatttatttatttttgagacagggtctcattgtcacctcttgcccaggctggagtgcagtggcacgatgttagctcactgcaacctctgcctcccagagtcaagtgatcctgccacctcagcctcctgagtagttgggaccacagatgtgcaccaccacgctgggctactatttttatatttttagtgcagatggggttttgccatgttgctcaggctgatcctgaactcctgagctcaagcaatctgcctgccttggcctcccaaagttctggaattacatgcgtgagctactgagcccggccttaggtttacagaacagcattccacccatgttatttatgcaggggagcacaccacacacatcactttgcagcttcctttctcctcttatatgtcttacagatctttctgtgttctgtacattgagacactcattcattggcttcactcattcatttgaattcattcctttgttcaacagatatttatcgtcagctctatgtcaggcactatgagaagtgcttgggatataaaactgaacaaaataaacaaagtcctttccattggagagatgacattctagtgtaaggagatagacaatagataataaatacaacaaataaataaatacatggtttagtatgttataagatgctttctgtaggaaaaaagtgagagggacctggagtggagggaggaccgagtggggacaggtgcagggtgggggcagccagtagagcccctctgaggaggagtggatcacaggaggatgactggcaagacctaaaggtggcaagctgtctctggtgctggctctgagagcaggatagctggagtagagtgagggaaaggcgaggtcagaggtgaacctgcagggcaggtggggctccttccgctagcgcatggtgttccattatccagatgcaccaggacaaatgtcgcccactgccattactaggtgcttaccatgtgccatcaagaacaataccgcaggccgggtgcggtggctcacgcctgtaatcccagcattttgggaggccaagatgggtggatcacttgaggtcaggagttcgagaccagcctggctaacatggtgaaacctggtctcgactagaaatctaaaattagcctagcgtggaggcgcactcctgtaaacccagctacttgggaggctgaggcaggagaatctattgaacccaggaggcagaggttgcagtgagcctagatttcgccattgcactccaactgggcaagagcaaaaatctgtctcaaaaaacaaacaaaaacaatactgcaataaacattctgtcagtctgtcattttgcccatggacagaatatctgcagaattaattcccggcagtgaacttgagagagatcacccaattgccttccaaaggagctgtgcctggaccatgggtttcagcacaaagtgctgctccctccaacttgtagactcttctggcaggtcacggtggagctcacattctagcgggagagtgtccagggcagagatattccattccgtgtcttttctcccagggctcgcacagagagggttcacgcggtagtcagtaggtgggcagtgcttggtgaaggcattgatgggtggagggattgaaggatgaatgaatggattaggggctgacagtgccgctgcagttactcaaaggagccaccaggaggcgcagggagcccacattctggagacaaaccttttaaaaaaagcatctggtgacttaacgaccttttcaccaatggcttgtgtggggccttaatgctagggtgagaaaaaggtgggagatggaagaaaggggagtgggtaaaaggacatgtgggagaagaaggcagagagagggccttctgagggggcctccacgccaggtaaggaccgtttagctcccctaagagcctgcagcattgatgcagatcccagcaaagccaaaacccccttatgcccacagttgagcccaaaagcccagaacagaggggaaaaataaatttcaggataggccaggtgaagtggcttacgcctgtaatcccaaaacttggcgaggtcaagtaatcccaagtactttgggaggctgacaggggaaactctatctaaaaaaaaaaaataagaaaaggaatttccaggataaatatgtacagtataatcccatttatgtgaaaaaaaaaatctccacaaataaattcctttgtgcgtgtgtgtgtgtgtgtgtgtgtgtgtgtttgtgtgtgacggagtctcagtctgtcgcccaggctgaagtgcagtggcacgttctcggctcactgcaacctccggctcccaggttcaagcaattctcctgcctcagcctcctgagtatctgggattacaggcgtgtgacaccacacccagctaatttttgtatttgtggtagagacggggtttcaccatgttggtcaggctggtctcgaactcctgacctcgtgatctgcccgcctcagcctcccataaattctacatattagtttggggagtgtgtatttaccacatacacatctacagggaaaatctggaaaggtaaatgtcgaattgacaacagtggttacttttgttattgtgtgtgtagagaggggcaggggacaaaaaggaaaatgaggagtgatcaaaggggactttaattttcttttttttttttgagacagagtctcagctcactgcaacctctgtctcccaggttcaagtgattctcctgcctcagcctcccaggtagctgggattacaggcacccgccaccacgcctagctaatttttgtattttattttagtagagacagggtttcggtttcaccatgttggccaggctggtctcaaactcctgacctcaggtgatctgcctgctgcggcctcccaaagtgctgggattacaggcgtgagtcactgcaccgggcccccaaaggggactttagactaaactgaaacattttaactttccaggaatctgtaaccctgctattatataaccacaaattaaaaattactttaaaaaatgaaaaaaaaaaaaaaaaaaaaaaggctgggagcggtggctcacacctgtaatcccagcactttgggaggctgaggcaggaggatcacgaggtcaggggtttgagaccagcctggccaaaacggtgaaaccctgcctctactaaaaagacaaaaattagcagagtgtggtggcacgtgcctgcagttccaactactcaggaggctgaggcaggagaatcgcttgaacttgggaggcagaggttgcagtgagcctagactgcgccattgcactccagcctgggcaacagagcaagactccggctcaaagaaaaaaaaaaaaggaaaagagaaaaaaaaaggaacaataacaacaacaaaaattaaatgctatcttgtgttgcatcaatagaagtcttacgtgcagctcaagggaggtgacagccccctctgctctgctcagaccacacctgggacctcctttcctcttcttggccctgtcccgtgagaagaataatgacagcctaaggcatgctgggggttggagatggggggaggctggggccatctgcacatgatacagatccaggaatagtccctttacccaagcgggagaaactgggcaggtgagcagcttccaggtgtgtggatggcaaatggatgccagactttaggataggaatccaggggtgcagcggatggaaagtccagcccaggatggggcatagttttcccacccagctagggagggagggtaggggctactctggggtgtcaggagtgccgaagcctgaggtaggcgcaagccaggcagcatggcagcatccttccagagggtgttgtgcagctgtggaaaacaattgctgggaggccggcaggggcagtggtggaggagaccagagcttaattctaggtgagtcacaatagcctcatctgtagaatgagtgaggggtggggcgtagtttcagattttttttttttttttgacacgtagtttcgctcctgttgcccaggctggagcgcaatggcgcaatctcggctcaccgcaacctccgcctcccgggttcaagcgactctcctgcctcagcctcctgagtagctgggattacagccatgtgccaccatgcccggctaattttgtatttttagtagagacggggtttctccatgttggtcaggctggtcttgaactcttgatccgcccgccttggcctcccaaagtgctgggattacaggcgtcagccaccgtgccccaccagtttctgactgattttcttttttttttttttttgagacggagtcccgctctgtcgcccgggcgaagtgcagtggcgcgatctcggctccctgcaagctccgcctcccgggttcacgccattcccgggcctgggaccacaggcgccgccaccacgcccggctagtatctttttttatttttattttcaatagagacggggtttcaccgtgttagccaggacggtctcgatctcccgacctcgtgatccgcccgcctcggcctcccaaagtgccgggatcacaggcgtgagccaccgcgccgggcccagcttctgattttatgcagctggcgggatcttgttcttggtcctttaaggcgaccggagggattgcagttttaaaaactcgccagcagaggtcgccttctgacggatttgaccaaaaaatccattccggtgggaaaggggaacctgcgcctgcgattctctctctctccccctctctccctctctctttctctccccccctctctctctctccctccctccctctctcctcctactcctccctccctccctctctctgtctctccctccctccctcccgctctctcccccctccccctctccccctccctccctcccttcctccctctctgtctctttctttgagacaaagtttcactctgtcacccaggctggagtgcagtggcacgatctccactcactgcaacctctgcctcccggggttcgtgattctcatgcctcagcctcccgagtagctgggattacaggcgcccgccaccacgcccggctaatttttgtatttttagtagagacggggttttgccatgttggccaggctggtctcaaactcctgacctcaagtgatctgcctgcctcggcctcccaaactaagattcatttgttgactaagtgaataaaaggggagacattgaagagggggacccgactggatttgggggtgaaggtggagttgagagtgactttgaggcttctgcttgagcaatgagtggagggtgcctctcctgagctggggaaactggggcagcactgacggaggggacacagctacagaggggagaaccctctcctgccggggctgcgggttacagcctgcactgcgattctctgatctcagggacctcagacttctggggccctgtcccctacctctgtgtatgaccctagctggctgagggctgaaggcttgctgttggctctttctgcaccctcagccttctccttcctcttccctctgcaggactctgtcctgggtccttaggaagagtccaggccccaggacagggaagttgggtcaggcctggacctcacattccctgcctgtcccatgaggtggacagtgagaggacaaatgcctggacccctggccccaaacccaagagcagatgtaccggagaagagcttcttagagcaccaggtgccagggctgcggtggagaatcaggggggcccaggggaaggggctgcagatgagggaggagatagatacggagggcctgtgtgcctcccagatacagggctggctttcccagcccagaaggttctttctgcctttcccagtcttcttccattctcatttcatgttcacacttttggccatacccagggtcagccatgaagattgttctcagaatgttttctttcttccttcctttctctttcttttctttctttcttcctttctttctttcctttctttttctttcttctctttctttttttcttttcttctttctctctctttctttctctctctctctctccttccttccttccttcttttctttctttcttctttctttttttgaaacagagtctcactatgtcacccaggctgtagtgcattggcacgatcactgctcactgcagccttgacctcctgggctcaagtgatcctcccgcctcagcctcctgagtagctgggaccacaggtatgcaccaccatgcccagctgattttttaattttttgtagagatgggggtctcactgtgttgctctggttggtcttaaactgctgggctcaagtgatcctcccgccttggccttccagagtgttgggattacaagcaggagcagcacacctggccaatgttttatttaaatcaactcacttaggttgaattagaataattttagacacacagaagagtgtgtctatataattttgaattatatacccaacactcagatataacattagcattttgccatatttgcttcatctatttctttctgaaatattttaatgtaaattacagatatcatgaattttcatccccaaatactttagtctgcatcagtcaaagatatctaatatttaatccacaatggatttccccagtggcaattcccctaaattgtgttttacagttgacagtggatttattgtaaaaggaaactcgatataccaagtgacaagcaagttatcttctgttataaatagaaaggatccctggaaatggacacagtgtcaggcccagagctgtgggtggagacctgctctctgtttgacataaataggagatcagtggctactaaatctgaagacagggcagcagcaaagaacattttctcacggatgtgatgagacttgaaagggactcagaaagggggtcactttctccaggttggggtaactgttatttaagccagggttcatctgcagcgtggggagccagagggtgaccccttccctaggtgatggaggtggctgaggctccagaagtttccagagaaagatctggtgttcctacaaggccagtggcagggggaagggcactagacagtggggctggagggtgtgggcctgtccctgctctgattttgggcactgcacttttgcctgtaagaaggggatatgtgaggccaggacagggtctcctactctgtccccactcccacgccaaacagggccttgaggactctcgcgacctccatgacccagcttccctcctaccccagccccaagcctgtttttgttcccctccctccctcctgcttgatctttgagcctcagccaggatgttacctcctcctagaagcctgccttggtccctggaatggattaagggactctctcctgggccccacagctgcccaggatcactcagcactgtagtgccctgttggcctttgcctccctccagctgtggacgtacaaagcagacagcgaatctgtcttgctcaccactgtacccccatcccctactgcagcacctggcacatagcagtagtgcggcacacttgttgaatgaataagggatcattactactacgcttcccactcataaatgtctgcctcttcggggggctcagaatgcacatttggtccttcattaactcatttactcacaattttttttttttttttttttttgagacggagtttcactcttgtcgcccaggctggagtgcaatggtgtgatctcggctcactgcaacctctgcctctcaggttcaagcgattctcctgcctcagcctcccgagtagctgggattacaggcgctagccaccatgcctggctaatttttgtatttttagtagagatggggtttcaccatgttggccaggctggtctcgaactcctgacctctcaggtgattcacccacctcagcctcccaaagtgctgggattacaggcatgagccaccgtgcctggctcatttactcacaaatatttactgagcacctactatgtcccaagcagtattctaggcactggaaatggggcaaggctgctgcctctgtggaacttatactggggtgtgggaggcaaagaaaaacaagcaaacatacatatgaaataatttaagatgccactcgtggtgggagggactgacaggagctgctgtggaagagagcattaggagggccttgctgaggggtgactttatttcagctgagaggtggatgagaaggcacctgcaggggaagaagaaccaggggaagggtgttcctgatggagcaacagcctgtgctaaggccccaaagtgagcaccagctgggcgctgagggacagaaccaggcacaggctcggttagaggaggtctgaggtcccagaggagacaagagaggggaaggatgggagggcaggcctgagccgcagaaggccagtggaaggttctgagtgggaagaggatgggataggagttatattctgaaaggtccgcctgtgctgggtggaggatgggtggggacaggcaggagcagcccaggctctgatgcagcctccaggcagagatggaccaggggagcccatttcatatccggcccctgtggagggtctgagggtgttgagcagacaggccctggctttggaagtcctgggtgtctggacccgcctgcctgtggggccccagcagagaggaagggaggcggggctcccagtgcctgttgactcatttgcatctgatttgcatgtgaagcagagagtcaggttgaaagctgggaaggcctgtgccagccctgggtagagggtcttgggtgttagttcccacaaagactctgtcccaggccatgaccttcctgttcaggaggggctctgccttcccttgcctccaacgcccctctggcctggccctgccatctggggctgggcagtgcccacggggacaaggtcgtttccttttaggagaggtctgcatgctatgaggacaaaggccaaatccccaccctcgggaacctccttccccagcaaaatcccatctgtcaggctcagcctctgaccttcgacctctctgtcagcacaggctgcagtgttggggaggggagggtccccacccccaaccctaggggagacccaaacctctccccccagccttctccatctgtccccttcggcttctgccacctgctccgtgtgatccaggccaggtcacctccgctttctgggccttggttcccccacgtgtccaatgtgggtttcccaaataccagtgacttgtgtcagtccacttttgtaattgtagccaactccacttactatttcttaagtgaacttactctccttcacttaaatagatttaatttaaaaagaaatgttataccagctctgtaaatggaaaaccagtttcatctgccacaagtagaaacataataggaaaaaataatgaaatggaaataaaacaatgttactctagtctagcctcaagtgaaaaaagtcagacacaaaaggttacatttatatgattgtctagaaaatgcaaaactagagagaaagaaaacagaccactggttgccagggttggggagagggagctgacaatatcaaggggtgcagaaactttttagggtgatccaaactgttttttgatgatgatggtggttacagattgtatacatttgccaaaaatcaccaaagtgtacattcaaagttggtgagttttattttatgtataaaccacctcaaaaagacaaattttagagaagaaaacaaagaaaaatgccggtttagccccaagtctgaggcttcctctctgttaaacaaattagcaaatagaaggccaggcatggtggctcatgcctgtaatcccagcactttgggaggctgaggcaggaggatcacttgaggtcaggagttcaagaccagccatggccaacatggtgaaatcctgtctctacaaaaaatacaaaaattagctgggcgtggtggcgcatgcttgtaattccagctactcaggaggctgaggcaggagaattgcttgaacctgggaggcggttgcagtgagccgagattgcaccaccgcactccaccctgagtaacagagcaagagactccatctcaaaaaacaaacaaacaaacaaggaagagaaagagggatttctctctctgtctctcaccaactctctaaccctccctagttccatgcaccaaggaaaagctatgtgaggacataggagaaggtggccagccacaggccaagaagagagccttcaccagggactgaatcagctggcacctccatctggtacctctaggctccagagctgtgagaaatagatgtgtgctgtttgagccacatagtctctgatattttgttttggcagccggagcagactcatgccctctgatctcatcattagcataatgcctgtttatagaaccatgctgtgggcaggctctgtgctaaaagctttgccagcatcatttcagagacttgatgtgacatcttacatcgtaggggaaattattgttcccattaaagatgggcccacagtgtggctaagccagtggggcatgtcctcagacctggagtgctcccataggaagctgggcccgattctttctgaaggtgtgagctggaggcagtgatggtggtttgagaggcacgggctgtggggaactggatactgagggcagtccctgtgtcccaggggaagcactctgtgctttcaaggggggcactggcagagaaggaagtgtccctcatcacatcctggagacccaccctctggagacagtgttttcacgatttcttttctttcttttttttttcagacagggtctcactctgtcacccaggctagagtgcagtggcacgatctcagctcactgcaacctctgccttctaggttcaagtaattctcctacctcagcctcctgagtagctgggattacaggcacccgccaccacgcccagctcatttttatttttttatttttcgtagagacagggtttcaccacgttggccaggctggtgtcaaactcctgacctcaaatgatctgcttgctttggcctcccaaagtgctgggattacaggcatgagccatcatgcctggccatgttttcactatttctatggaccgtttcataagtgttgtgtggacatagggctccagggttaaatgtgtttgggaaatgtggtgtaagcaaagagaaagaagtttccactctaatacttctcagagactttaatgtggagataggcatggcgaatctctcactgcgggacaagtgggcaagagaagtgtggatgctgccttctgggcactcacagttggtggaggagacagccaacatgcaagcaggggccacaccacatgtctggaggttggaacgctatgcagagagaccacaggaaccatgggggaagtggggagggatttcccagaggagatgacatttgaacaaagatgcaaaggaagtgtggaaggaggtaagggagagctgtatgactgtctgggggaagagaaacccaagcagagggaacagcaagcacaaaggttctgaggctcaaggttgcttggtgcatttgacaagcagaccagcgccattggctggagctagctgggccgagtgggagggtgataatggatgaggttgaccacggtccgctcccaaaggccatggaattcagagcatactggagagcccttagtgggtttggacagacagtgataccttgggacacacagcctcatgagctcatactgaccaaacaaaccacccaaaatagcagcagaaacaacagccacagggtgcagagggtcattcagggtgcctctcacaagcctgggaagtaggcatgtgatatggtttggctgtgtccccacccaaatctcatcttgttttgtaactgcttcaattcccatgtgtcgtgggaggaacccggtagggggtgattgaactgtgggggcaggtctttcctgcgctgttcttgtgatagtgaaaatgggtctcacgagatctgatggttataaaaatcggagtttccctgcacaggctctcttttttgcctgccgccatccacgtaagatgtgacttactcctccttgccttcggtcatgattgtgaggcctccacagccttgtggaagtccattaaacttctttcatttgtaaattgcccagtctcgggtatgtttttatcaacagcgtgaaaacgaactaatacagcacggttaactcccattttacaggcgaggaagctgaagcttagaaagatgaaagaatttgcttgtgaccccgaacgttccctctggctgatgcattgttcctacctgctctgtttccttgtttatgaagcttgcaggctccatggtcctcaaccctggctgctacacactggaataacctggggtggcagactgtgtctccccaggatggccacaccaatacatctcacatcccacatgcttggccaatagcatatgacagatgtgactgtgggttacttctaaagctaggccataatagccatcgcaaccccaccgtgatctctgggattgctagttctgagggaagccagctgccatgtcctgaggttactcaagaagccctgtggagtaggccatttggggagggactgaggcccccaggcaacatctgtcccaacttgccagtcatgttagtgaactacccttgtccagccttcagatgacacctcatgagaggccctgagagagtcttattgtcccgttcaccattcctgttgccctgtggccagctaatcagcttgtggtggttttcatttcttttttctttttgccattaatagcaatgccaggctgggctcagtggctcatgcctgtaatcccagcactttgggaggccgaggtgggtggatcacctgaggtcagaagtttgagacaagcctggctaacatggtgaaaccctgtctctattaaaaatacaaaaattagccaggtgtgatggtgtgcgcctgtaatcctagctacttctcccaagtagaagggcgtgattcttctcatgcctcatgctgaggcatgagaatcacttgaacccgggaggctgaggctgcagtgagcggtgtttgtgccactgcacttcagcctgggcgacagagtgagactatctcaaaaaaaaaaaaaaaagtagcaatgccatagtaagtattcttctaattaagcccttctgaatcagcttaattatttgcttagggtcaatttctaaatgcacagttgctggatcagagtacaagtccactgatacagcatttaattttttcaaagaattgtgactgggccgggcacggtggctcatgcctataatcccagcactttgggaggccaaggcgggcggatcacctgaggttgggagttggagaccagtctgaccaacatggagaaaccccgtctctactaaaaatacaaaattagctgggcatggtggtgcatgcgtgtaatcccagctacacgggaggctgaggcaggagaattgcttgaacccgggaggcagaggttgcggtgagctgagagggtgccagcttgggcaacaagagtgaaactccgtctcaaaaagaaaaaaaaaaaaaaaagaatgtgactatagctggccgtggtggctcatgcctgtaatcccagcactgtgggaggcaagatggtcagattgcttgagtcaaggagtttcagaccagcctgggaaacatggcaaaaccctgtctctacagaaaaattagctgcgcatgggggcagacacctgtagtcccagctacgtgggaggctgaggtgggagcatcacctgagcctgggaagtcgaggctgtagtgagctgtgtttgcaccaccgcactccagcctgggcaacagagtgaggccttgtctcaaaaaaatttaaaaaataaataaatgtaactatattctccttcagtagcaacatctcaatttaccttctcatgcacagtgtttggaaggacatattttgggatgagttttcttttacttcactaccttattttgttctttcatagaatgcctttaaaatgttactttaaaaaaatagataatacctttacaaggtacaaaatccaaaaggtataaaaatgttttctttttttttttggagacagagtttcgctcttgtcgcccaggctggagtgcaatggtgcgatcttggctcgctgaaacctccgcctcccgggtttaggtgattctcctgcctcagcctcctgagtagctggaattacaggtgcccaccaccatgccctgctaatttttgtattattagtagagatggggtttcaccatgttggccaggctggttttgacctcctgacttcaggtgatccacccaccttggcctcccaaagtactgggatcacaggcataagccaccacgcccggccaaaaatattttataaaagtctttcccccacccctttcccctcagtcagcacaagtagccaccactgggaccagtttctggtggataaatccagaaaagttcaggtgcaagtaaacacacatagagagaacaccctttaaattaaatgaaactaaagaaaacagagccataggtgcacaggagacagagagctgacatctggggctgattgcatcttggtttcgagctgagtggcaaaaatactgctaaggtcaacgttctgaaggaggcaaaacccacacgcagaaccagccataggcctgtcaacaaggcgagatgttatcattgctcatgtgctgggtcaggataaggccatacagaccgcccagttctctctgatctgggtgtagttaatgacagtttatccgcctttttcttctctctcaccactccccatggtgggggaggagaaggactgggaggacttgaatactctgaattggcaccaggtgcttaatatagtcctgaaaatagaagaccaatatgctgttggcacataaagatgcccacaattctagaatctgagtgcgcccagatgatctctctttacatggcctaatttgggatcctgacaagttccttctgccctctgcctcactttctcaatctaggaatgggcctctcggtttttgttttgtctaattttaagctctcggctgtgcatggcagaggcaaacttgaagacgcaagggtcagtgagcagggcctttatccaggtatctcaaatatctcccaaccctgattaaagttacatatctcagagaagaatttggtcaacaccattgttgtcattcctggttaataacagggaagttgaggtctgggaagcaccctagtgatgtgttcacatggccatgtgcttctgtaaaatttaccaatgtaaggcatcttaacctcattctgttaaaaccactatctcctttcattccaacttccctttgcatcagatgatgttggggttggtgtgagcagtttgggcatcttgctaaaaggaccttaacatttactttgggtttagtgggatatatttatattgtttccagtcacttttgtgaaaaattattactaactgacctggtattgaaatggcttccaggaatatatccataccgagcatactgagctgactcaacttgtcgtggcatcaagattcaggatcagaggttatatctcaagatatatgaatggtcctacagcactcagttccacaagactgtgaaggagaggtttgaatgtatacacggagccagcagctagtttatggaaagtattacagatgtgtttgagacaggcagctaataaaaagaatgttatttttctgcgttttgtaacgtttgtgcaatttctcttttttttttttttttttttggagacaaggtcttgctctgtcatctaggctggaatgcagtggtgaaatcatggcttactgcagcctcaacctcctggtctcaagcaatcctccctctcagcctcctgagtagctgggactataggcacgtgccaccatgcctgactaatttcttttttccttttttttttttttttttgagacggagtctcactgtcgtccagcttggagtgcagtggcacaatcttgactcactgcaacctctgcctcccagattcaagtgattctcctggctgagcctcccaagtagctgggattacaggtgcccactaccacgtccagctaattttttgtatttttagtagagatgaggttctgccatgttgtctagattggtctcaaactcctgagctcaggtgatccaccagcctcggcctcccaaagtgctaggattacaggtatgagccaccatgcctggccagctaatttctttttaaaatttttttgtagagctggggatctcgctttgttgcccaggctggtctgaagcccctgggctcaggcactccttccacctcgacctcccaaagtggtgggattacaggcatgagccaccttattgtggtttcttgtctctttctaaccaaatcttcactttattacttaatttcatatctgtaattttttcttaaagaggtctccctagggctggacgtggtggctcacgcctgtaatcccagcactttgggaggccgaggtgggtggatcgcctgaggtcaggagttcaagaccagcctgaccaacatactgaaaccctgtctctactaaaaatacaaaaaattagcgggtatggtggcgggcacctgtaatcccagctactcaggaggctaagacaggaaaatcacttgaacttgggaggcagaggttgcagggagctgagatcgtgccattgcattccagcctgggcgataagagtgaaactctgtctcaaaaaaaaaaaaaaaaaaaaaaaaagaagtctccctaggctgaagctacctgctcaatcttctcttgtgtcttataggatcacaggatcccccttgccttacctcactgttactcccaaacagttctcacatgtttacaagggaatgtaacagagtggatcagagaattcattctggatccagaccgaccttagttttctcatctatataatgggaataatagcaggatctctcgccttagatagtcatgaagtccaatgagatgatgtgtataaagccctaacacaatgtagcagagggcacagggccaggattgatatttagctggtcctcacggatacagcagactccctgtttatgacagtggttggctctgatttggttggtgtccatgccagagtgtacaatcattattagctattgatatattattagctccctcccctgcccacccaggggtttacgcagtaagttctcaattattggcaatccaaacaaagaataaaagacaccagctggaatgaaacagagaagctggttccaaattgagcaattcagactgactgctataaaatttcctcaccttaaaggcccttagagttaattcattctaatccccctaaaaatatacttttttgacatgttcaagtattggaaatttggaaaattcacaaaaacacaaagaagaaattaactgctgtgattatagatgattatacacatatacatatgtatttaatacatatttatgctgtacatagtgttttgaagcatactgtacttcaaaaaaatttgggaggggtgcattggcttatgcctgtaatcctagaaattcaggaggccaaagcaggaggatcacttgaggccaggagttctagactggcctggggcaacatagcgagacccgtagcttgacatggtgatgcgggcctgtagtcttagttactctggaggctgaggtgtgaggattgcttcaacctaggttacagtgagctatgattgcaccactgcactccaccctgggcaacagagctagaccctgtctctaaaaaacataaataaaccaatgtttaatacttagcatttccccctatctttaaatatcttctagctacttcacttttatttttatctttttgagatgatctcttgcccaggttggggtgcagtggcatgatctcagcttactgcatcccccacatcccaggttcaatctattctcctgcctcagcctcctgagtagctgggattacaggcatgtggcaccacgcctggctaatttttgtatttttagtagagacgaggtttcaccacgttggccaggctggtcttgaactcctgacttcaggtgatctggtcgcctcagcctcccaaagtgctgggattacaggtgtgagccactgctcctggtagctacttcacttttaatggctgcataatattcctcatcagaaagtgggaaaaattaggctaggtggcgtggctcatgcctgtaatcctagtactttgggaggctgagttggtagaattgctagagctcaggagtttaagatcagtctgggcaacatggcaaaaccccatccctacaaaaaatacagaaaataccgggtgtggtggtgcacacctgtagtcccagctacttgggaggctgaggtgggaagattgcttgaccccaggagattgaggctgctgtgagctgagatcctgccactgcactccagcctgggcgacagagtgagactccatctcaaaaaaaaaaaaaaaaaaagaaaagaaaaagataaagaaataaataaagtgttaataattaaaagtacttttagagggttatgtcataagccttgacaagacttgttctgtaaagctacccggcatgcaaaaagctcaattaagttagctcctccacaggatggaattatataaccaatccctttcaagaggcattgaagttgtttccattattttgctatgatgaataaggctgagcaatattaatctttgctcatatctttggtcatttcctttgtaaatttcgggactgctgggtatgcacattttaaaattaactcactcatcatcatgcagttaggagaacagagaaaggaaggggcttgcaccgggtcacatagggagttagcgtcaaagtcaggactaggaaccagccagggccctctaactggagctcttccagctggggtcctagaggaagtcccagctggccgcgggagggaggaggaggaagggaaagaaccaggcgccggggctgaagcggcggcaggaagaaggtggggccggctgggaggagcgggcggagctgctgagcagcgcctctccttcgggcgggggaagctaagcggtcgcctggcaaccctggcggcgcgccgttcgaacggaagcgaggaaccaatcaggaagtccggggcgaaccattctggtgtgaaggggggcggcgtgctcacttccccttccacggcgccccagggactttccctgcggtgggggccttcgacagtgagggccacccgctcagctcgaccgcggagggcagctccaaaggggaccccaaaggtgcccacgcggggctggggcctcctgggcgtcgttgggagcggccactaccggcccgggtccgagctgtcagcctctccaaagcctgcgcgagaggagccgggacacgcctagcgcgggctccaggtgagggcgcgggtgggtccgggtgcgaccccgggtctgggggccccgttccccgagcgtctgctgtctgctttctccccgcgtcgtacctgcgtgtcatttcacagatgaggactctgaggctcagagaggcaagtgtcccggcccggcgagctctggcggagaatccagttcaagtctttctgccccacctcgcagccccctagtctagtcacatctggacttgccttgagaggcccagacgggcaactggtagtcattttcccagcgttttatcggcagggacctgtagacccctggctggatcacatatccccgcgccccacactgtcctcgggataccccctttgggcgtctgtctttccttctccgcagtccggggttggactcggctcatttggcgcctttctgtctacggggacagaggaccactctttggggatcggacgggactgacatttctgggctggatgcaggggcagcagattctccagcccccagagccgctgctggcctcttgggaatcatccccagtttggggaagggaatagagccagtccctaaaccaaagccactagtcaccagagactttggaattgggagtggggccggaatccccccaggtggagcagctgacctaggccagaccctgctgtgtctcctggggacaccccctgccccctaggttgctattgtcagtctccttttgtaggtggggaaacggaggttctaagaagttaagccccttttcgaagtcacagtcagacaatgcagtggttagctcctagtccctctggcttcaatcttagaatccttgacacacagaatcatgcattttgagagtcttcaatctcttcataagggagttacatatcctctctcctctggagcctgcccctggctttgggggacaggatctccgaggactcagaaagaaaacaaggctttcttttattctttcaacaaatattatttattgacttcataagccctgctctggttcttgcatgttttggtttttttacttattagcaaatgtatcatcttctcccactgtgatgcaaggcaggggctgaggcaattgagccagtgcaaaatttagggatgcccaaaacctcagtaatcaagactgaaactaacgttcatggaccatttgtgtgttctgcaggcaggaggttaactcacacagccttcatgaagtgcagtcctcccatctctctctctctctctctctctctctctctctctctatatatatatatacacacacacatatatacacacacacatatatgtatatatatgtatgtgtgtatatatgtatatatgtgtatatatatgcatatttataaatcatgaaaccactgccctgtccctgagttgctctgtgacattgagtaagtttcttcagtctctgggctgagctaagaagtcatgatggtgcactcaggcctgggcagagggcagtctaggataggaagtgggcttggctgtggatctgcctccccctcccctttctaatcctgcgtgccaggcccttccccaagaccttgcatgtgttatcttccattctgtcctcactgcaaaatccttcatccccattttgcaacctcaagtgcagacctaggcctagaagatcaacttggtatcagtgggcctagatgtccacatccacacccattccacagcctactcccttctcccttcctaatgttagtgcaaggccaccctgagcaaggctgactcctgggcaggccagggcaccagcgtctgggaggcctccagaaatagctcagggcctggtgtggctctggaggtggcccagctgggtgtccctgacctggacagctgggctgaaattgagctggggctgccctgctggctggccccttgccactgcctggagccttcccaatctcctctggggcaggcaagggcctccccaaatctaggccaggcttctgctgaagggaaagaaagaagcaggtgggaggaagggggcgggttgggtgtagaatgtcatgaaaattataacctttggaaaccacacctcccaccccctcaccaaagaataaaaatcactaacacctcttgagcatttactatgttctaagtactttacaagtatgaactcatttaattccctcaactctgtgatataaggtaattactgctgttcttatttccatcttgcagaggggaaactgagcacaagagaggtttaataatttgcataagataacctagaggtggagtttgaacccagagagtctggctctaaattttacattttttgggggggggggtggggtggggcagtgaatgaattaaaatgtatataaaataaaatttaccattgtaaccacttttaagtatacagttcagtggcattaagtacattccccattgcctctccccccagtgcctggcaatcaccattctactttctgtttgagtgaatttgactactttgggtacctctaggtattataaatggaatcataacagtatttgtcttgttgtgtctggcttatttcacttagcataatgcctttaagtttcacccatgttgttgtatgtgttagaattttcttttttatggcggaataatctattctaatattctatgtatatgccacattctgtttatccattcattccttgatggacacttggattgcttttggctgttgtgactaatgctgctttgagcatgaatgtacaaatatctgtttgagttcctgtttttaattgttttgggtatacactcagaagtggaattgctgggtgatcctatggcaattctgtttaattttttgaggaactactttactgtgtttcacagtgactgcaccattttatgtgtccatcagcagtgcacaaagtgctaatttctcaacatcttcaccaacacttgttattttctgtttgtattttttttttggtaatggccatcttcaggggtgtgatgtggtgtctcattgtggttttaatttacatttccctaatgactaatggtgttgagcatcttttcctgtgcctgttggccatttgttatctttggagaaatgtctgttcaagtgactctgcattgttttttttttttttttttttttttgagacaagagtttcgctctgtcgcccaggctggagtgcagtggcgccatctcggctcactgcaacctctgtgtcccgggttcaaatgattctcctgcttcagcctcctgagtagctgggattataggcccccgccaccatgctgggctaatttttatatttttagtagagacggggtttcatcatcttggccagtctggtcttgaactcctgaccttgtgaaccacctgcctcagcctccaaagtgctgggattacaggcttgagccactgcacccagtcatgactctgcattcttaaccattacctgtgcttctcttagatttgtaacctctgagaatagtggatcagctttctgggctgatgaagccctccctcaggagctgggcactggatgatctatttggttgaatagttatcatagcctgcactttggtgacatttgtcatgcatggacctcatgcagagagggaggcactgttgtgagtcctgttttgcagttagggaaactgagatatggagaagttgagtattttatccaaggtctcatagctaatcattggtggagctaggatttgaatgggttctggagtccatgctataccttacagatatggccagggggatggagtagtgaagaccactgcaggcagcagaaccagtgtgtgcagaggtttgtatatggtggctttggagaaagaacaggacttgggtagaagtggtcagagcccagcttgaatgggggtgacttgaagttggaggaagagtaggacaggtctggaaaggccaggagcacggtgagggtttggggaggaggcttggtgcttagggaccctgtccttttttttttttctcttctcacaagatatttattaattacaaagggaaaataataactgtacagtggagaaatttggcagatactgccttaaccaaggaattggctgatcactaagattaagacaaactgttgttatgagtgggtgtggtaatgtacctatagtcccagccactcaggaggctgaggtggcaggattgcttcagcccatctatttgaggctgcagtgagctatggagtgcactccaacctgggcaacacagtgagacctcatttctaaaaaaagaaaaaagaagccttctgataccatgtactaagaaggacacaacatcacttttgtgttattcttgacagatatgtttaactttctctcctttctttcttcctctctttctttcttctctctttcttactgatataagaaaaagctttatacatttaatatatacctcttgatgagtggccttggcctttgaggtgggctgggtccagaacagccggttgttcaacggtatttcctcgtgtttggtccctgaaggaagaaaattggaagggtgtgatggagctcatggtccagtgggagagacaggaaacgagttatatttcctatcctagataagagtatctaaaatgacaggatgtaatgagtgctcggaagggaataaaatgggtgaaattgctgagggggtctcttggaggagatgacatttgaaatgagatctgaagggggtgagggaagaggttccagacagagaacagctggtgcaaaagccctgaggcaggaaagaccttatgttcaggaacagcagggagggctttgtggccagagcaggaaagaggttggagataagatgggagatttggacaaggactgagtcctggaaggcctgagggccaagtggggagcttggattttttttttttttttttttgagacagagtcttgctctgttgtccaggctggagtgcagtggctcaatctcagctcactgcagggagcttggattttattgtaagggagccacaggagggtttaaacacagcagtaatgagactttatttctgctgggaaaacattgccgttattgcccccattttacagcagaggaaaccgagactcagaaccatgaccagggagtgcttcctaaggtggtttctccctctggggtccagccgacgaggcagtagattccttgggacttccttggggggcacatctggtgagtggccaaagcccaacactgaaaacaccgtctcttccacctcccctccccagatgtgagcctgggttccaatcctggctctaccattaatcagctgtgtaattttgggcacgtggccttacctcttggagcctcagttttctcatctgaaaatgggcataataatagtagccctcacagggtaggtgtgaggattaaattagttaacattttgtagagcttagaacagtgtctggtacaaagaaagtgctcagatgagatttgttcttttcttttttggctgtaagtttattcaatgtgaaataatcctctccaattttattgaggtggctgaccacgtccacgaccacatctgcctctaaactggaattcggttgctgacccagccccagcctcggctttcttgtcagcaccagggggcacagaacaccgtctgtaggtatctctgtcagcttcccgtcttgtgagtcttgcaggtcgcttaccctccagacctttaggccgaggcctgccagtctctggacggctgcggtgtagggtggcaggaacaatctccgggggcagatgtagggtggcaggaacaatctctgggggcagatgaaggtaatcacggagatactggctaccctcattggtaaggtaccagtagaaatgtctccaggcaaactgttccttcacgcagccccgggacttgagagactgcatggccttcatgacgtgaaggttgggcacattcttgtctgccagctccgggtgcttaggcatgtggacatccttcttggccaccatgactccctccttaaaaaggagttcatgaatggcaatccggttcttcttaggcatcagcatcttggcagctgtagggtccggggctggggctggaaaggaaggactgttcttttctttgctattacgaaaatcattattgttgctttgctgttactactattagcgcctgaaggagccttccctccccatcccccatttctgcctccgtggagggctaggcagggctcagcaggccatttggaggatgaaggacttgttgccccgtcccctgtaaagtcagggactggaggaggctgcagtgctgagggggaaggaaagctgatgtgcatcactgccggtctcctcatgccctgtaccctagtcctggcccagctcccacaggcacagacatggaacaggagcctcttcagcctgagtgtggcagagggctggggctgaggcctgggggacagctccttctctgggcctcaggattcccatgaaaaaatggcctatcaaatgttcctacctgcagtgagttataggacttggggtggaagaggtgacagtcacctccctctgggaattccttcctgcagggctgcagtctcatgggattaaatgagggggctctggggatttaaatgagtatggtgcctggcaccccaaaattctagttattgttgttactatgacggctgttgttgccgatgttaaccgttttcacaaggcagctgaggcatgctcaggctcagcctgttccagagggatggactctacacgtgacagcatggagcaccaggagggtcccgcagcctggtcagggacacacagctagaaagtggtggcgttaagccttggtctggagggaaagtgcgcaggctggactccccagagtgattttgggctagtgactcagcctctctcagcctcagtttaccattagtcaaatggggtaacaatagaactcaccagatagtgattgttgggaagattaaaatgggttacccgataccaagaaaaacactttcccgtgcctggcacagtgaacatcacctggcggtcgttctgagtgtcagggagcggggctcagtttgtccatctctaaggtgggtgcgcttgcctgccagagccacggggaccccgcgcgccaggtgtgcggtgggcgggtctcggctcccggaagaacttccctgggtggtcctggagcgggtcggacccagttcctgagccaggccagctgccggcggccggggctcgggttctggcccctgcctggctttccttacccttttcgggtagtacctggaccagcgggttcacttgcccgcggccgccggaagttgcgcaaactcagcttgccggagccccaggtgggccgggccggaggagcgcaggccagcggcgcgggcgcagccgggtacgtgcggaccgcggcggggggcgcccagccggggtagggggcggcccgagcacccctccaccccaggacggcgggaacggggcagggatctacctttcggcttcaagaggaccgcggggatggtgccgctctctccctcatttgagagccaggaggggcggcgaggggcaagggtcacacagcgccctgctagccgaccccccatcccccgccaccgggagtcctcaagcttttccggaattgagggagagcaaaagccagcctggggatctgagttccccccagccctgccccgcggcctctggaggctgacgctggggagctagtggggagggggccaggtggggatgcgcgcccccgggatgcaagccagaagggccggcggttgggggcatccgtgggaggcatttgaatccgtgggtggggcattgggcggtgagaggaggcctcagaggggacattgagtcgcgcttggggacttgggaccctggcttcacctggcgggagccgctgcacctccgtttgcccacccgtgacgtggggctgttgaggtcagctcaccgatcagcctctgtcttgggcctgctttgtccgcggtgtgggctgggacagaccctcgtggggcttgcttagagacccctgcgtgggggtggtctgtggacttggttagtcgaaatcttcttgaagaccaggagcctggttcgtggctccgcctttttgccagatgccgaggaaagccctcgacctgtttgatctctccatccttatcgtgacctggaggctcaggaaggtctatttttaacctcgtttcacggataaggtaaccgagtctgtaaagaggcgaagctgcttgcgcaaggcgcacagcgggcgggtgggcgagccgaaggccggcgggcccgcggcgccaaacccggggttggctctcgcatctgtcccggccccgccagaggggacctcagggccagcagatggggccagaggggctgggggcccgatcggggtcgtgcacggggtttctgccccggccccgcccgtctgacctccttctccctctttatccggatggtgcccgcaagggaactgccactgcggacgggttggactggtttgggaggtggcggcctgggggtggggcagagtttggctggctctgctgtgctcctttcctgtcaggtccttcccacctgaggtctcctgggggtcggccctggtggagcgaggcttcctttcccatccactccatctctcctgccttgggagcagcacccaaggatctattcccaactcatggctgctgcagaggtctccagctggtggttgggggccagatggaggaggaggggacagatatgttcgcagacatattttgtttgctgtatatgcaatgttttaatcattattatcgaatatgctgacagttaagaatctagagtttttatgtactcctggatttccagcttcctggaacaatacacctaccaccttggacccatatgcctgcagcaggcagggtacctagatgtctagttcatccctgatcacccagttcacatctggctcccataaatatttcagttcaataaatttttattgaatattctgccctagtatgtgtctagggcagtatcttgaaactggggtatagtgaacaaaatagccaacccccgcccctacacacacacgcctgccctcatggagctgatattttagggggatagagacaacaaagagtaaaacaaccatacacaaatagagtacttgtgcaggggataaggagaaaaggaatagtgccgggagggggtcaggagtgccggggagaaacaggacgtggtattgagatcagtgccttatttatctattctgggacctgggaaagccacttctctgagtctcagtttctccatctgcacaacgacccacaggcttgtgggaggttatagggaggatggcacccagcagagatccctgcctccccaccccaatccagactcactcccttctggatttttggatgtctaggtggggctgtccaatgtagcttcctaccatggatggaaatgctgtactctgtgctgccaaacacagtggcaactggccacatgtggctattgagaacttgaaatgccactagtgtagctcaggaactgaattttatgtttttatttcatttaaatttaaagttaaggttgaatagccacatgtggctgctggctattgagctggacagcacgggtctagatggcttgaactgtaagccttcttggggaacacccagattaagtacccgccccctccattttacagatgagaatgtttgggacttggtatgtgggttttcttctgtcccatctccaaggggccttgtggggtgactctgtgggcttggcccttccttggaaacagggtcagggttggcttgatgtctggggcatcaggtcctgacacttgggtgaccacgtagacacttgtgcatccaggtgtatgccctcctcccaggtgagtacccattccatggctgcaggcagatcgagggtctgccggatgcctccatgcagggctgtgtgattttggacatttccagcttctctcagcacagcatagctcagggctgatgtttccacgtgacaggcatttgtggatcaccgtgggccatccagttccatgcaggaagctgacggatgtctggactccactggggcgcgggtggagattttctttgctccttccctataagctctgccctttgcctggggcctggcatgtctaggcgggtggatggcacagggcagcttcctgcctggatgggtgaggggtagaggtggtaccaggctccctgtggggagtccaggtggggtgtggggctggagccctttttcttggtcatttaaccctacgccccggtgccagcaccttcctttttggtggtcaggggcagagccacctactcgctgggttaacttaagcaagttgtttgcctctctgggcttcagtttctccatccaaaaaacggggctgttgagaggacctgaggttgagttgactggtgcgtagcacagagcctggagcctcccttgctccctttagcgcgtgccttgccctgtcttttctgctcaggttgcccaggtcgcccaggtcttttttctctagcaccttttttcctctcttggtctcagctgggcctggttctcccggggcaggagggagggggtgtgggtggggcctgaggccccgcagctgctgccttgtgcctgctgattggctccttgtggaggggcgtggtctctaccttataatagggagggcgtcttatcctctcagccgcggctgagcctctttgtctgagcgcgctcggcttttttttttttttctctctccttccctgcagcagtggccggtgtccagctgcctactttctgcccggatctctggctcctcatctctccggtctccgcagactaaagccctcgggatatgcagcagccatgcctgtgcacacgctgagccccggagccccgtccgcccccgccctaccttgccgcctgcggaccagggtccctggctacctgctacgggggccggcagatggtggagcccggaaaccgagcgctgtggagcgcctggaggccgacaaggccaagtacgtcaagagcctgcacgtggccaacacccgccaggagcctgtgcagcccctgctgtccaaacagccgctctttagccctgagactcgccgcacagtgctcacgcccagccgccgagccctgcctggcccctgccgacggccccagctggacctggacatcctcagcagcctcatcgacttgtgtgacagccccgtgtcccctgccgaggccagccgcactcctggacgggccgagggagccggccgtcctcccccagccacccctccgcgaccgccgcccagtacctctgcggtccgccgggtggacgtccgccccctgcccgcctcgcctgcccggccctgcccatcacccggccctgccgccgcctccagcccagcccggccgccgggtttgcaacgctccaagtcggacttgagcgagcgcttttctagggcagccgctgatctcgagcgcttttttaacttctgcggcctggacccggaggaggcgagagggttgggtgtggcccacctggcacgggccagctcggatatcgtgtccctggcagggcccagtgctgggccgggcagctctgaagggggctgctcccgccgcagctcggtgactgttgaggagcgggcccgggagcgcgttccctatggcgtgtcggtggtggagcgcaatgcccgcgtgatcaagtggttgtatgggctaaggcaggctcgggagagcccagcagctgaaggctaggcgccactgggcctggaattcgccacaggacggatcttacagaggcaagtggtccctggacctctcttgcatccattctctagacggccgtgtcagaggctccaccctgttgtgaacttggtatggaggcaaaggcttagaggctggaccagcattgttgggcaaggactgactctccaagggttttgttcttggctttggacacctgagaaccccctcctcccctcccccaatacaaggtttttgacatgagtgtactcctgcttagttcctcttgtggggctgcatttgcggtgctttgccctccccactgtgagtgaggggccaagggatctcctcaatcctgtctccccagcggctctgtttcctccttccttccttggcctctgtcctttgctgacttcctcttccttacccagcagaactcaccctggggtcggggcagtggggaggggcctatccactgctcttcctagtccttggcagctggcctaggtgggcagactataggagggactggttaggagtctgcattgctttgacttccctctccttggttaataaacacaaatgcttgtttctcaagggctgggccttcagactcttctgtgttcacaagagaaagggtgagagaagtcttggggtggggccatcaaaacagtaattgttcaccccgaggtctagtggtggggcatgatgatagcggctggcctggctggagacatgtccccgtggtgggttctcataactctcctggaaggctagcaggcctgcctcatcgaggaggaaactgagatccagccatgagtgagctggaatagagctgggagtaggaatggggtctttcccctgcaccagaaagggagcctgcaggggaaaggccgatggggtgcatagactctccccaaccaggagtgttccatccaagccctgcccagttcccaagggggcaggaagctcggagagggcaaatcctgaacttgaggtcacacagaccatagagtgaggatgagaagtgggagttttggaggaagagagacttggggtggacggcacaaaatgagtggcctccctggcgatcttggacaagccagtttccctctgggcctcagtgggagagttaggcagcacagtcctccttgggttggggcactggtgcattctgggcccttcatgctatattccaatacctggggagaggggaaggaaggggctggcactgggcttcgaggcctcagcttcttccagtctccctccaggtcagttacctactaggacaccccaccttggctagtggagcagctagggctagagctgggcctacaaagggcgaaagcgggggtggcctctctggtgccccacggtgggcgtggagagggggtgggtggcgcttcctttcacaggctgccttggctgcagcactcagaaacaggaagctctaatgggggccctggtgacaggtttgatgtaggttttattttaagcataaagaggagatttccgttggactgttgacaaacatccacatcagcccagctgtccatctctctgtctgtctgcctgtctacaactagcccccaggggcctgggatgggcctgggcagtttggggaaggaagggaaaattgggttctagaagaagatggtgttccagctcatgagactggagctcatgatactggtggggagacaagcatgaggagggtggtgacctacccacaaccccccatggtgcccagcagttttgacaatgcaggagctgggcctccagggtccccatgctgaaggagtgatggtgtcaggagagagaatccaggcaggatctgcagacgtggtgccctttgaggtgtcaaagactagatttcctaggcaaccctgctagaattcagggctagtcattgccccttgctgtgacctggcagcctccgagtaacccaagaaggtggatgggctggctgcattttacatgtgaagaaattgaggttcaggtcacaggactggtgggtgacaccttgtttctgaaggagggtacagtgcttgaatcctcaaggtagccttttgaggaccagatatattgtcagagcaggaggttgagctcagggaaggatagcgacttgtatactgtcacatagcaggtctgcaggacagcctggggtcacactcttgcctgccagacacatcgcagtctggattcctggttctcccagcatgtaccccaccactcttcctcatcttggcagccttttcttctggtcactttattactgagcatctactgggtgcccagcagtggataagacagacatggcccctgtcctagtctggagaagagaatgggcaactaaacattcagcacataaataatcatagaatgtaaagcaggtatacttagggacttctgccctaaaaccagagctgttcccaggagctggaccaggggatagctgaaaagagaacgcctttccataaatccactgggagggtctgttggggagagagcagggagggattcttggaagtggggaaggtgccagattgagtcttctccaatggttatggcttggtcttgggagggctccccctgttccaggattctggagcctcccgccttccctgcaggcctctgtggagggagcagggcggggggcttttgcactcctccctcccccaaccctgcagccttggggatctgtggaaacagcccctctattgttctgcctccagttggagtgtgagccctcggagggcctgcagctgctgccctgtctcctggggctgcccagccctccgaagcagctcccccaggccagcctggccccagctgcctagcccctaattaggcagagatgggatctgctctctgatccatttcccaccagctaattatatacacgtggatttgggaaccaggcaacctggctgctcacttctatcatgaaggtggatgggccctgggaaaggcagccccccccccacagacctcagtttacccttttggcagaggatggagtgtagctgcagaggcctgttccctgtccttggttaaatagttctgttcctgctactgaaacatttaaggagaccccccacccccatcttacctgatatcctgtgtacaggggaccaggaaagggttgaggaatttggctataggtccttgactctaggaccccagggtagggtcataggatatagatgagagcatggctgcagctggctgccaattagatgtgcatataggagggcttacagttgtgctggtccatctgggtggcctgaacacccggccgggtgcggtggctcacgtctgtaatcccagcactttgggaggccaaggcaggcggatcacttgaaaccaggagtttgagaccagcctggacaacgtggtgaaatcccgtctctactaaaaatacaaaaattagctaggcatagtggcggacacctataatcccagctacttgggaggctgaggcatgagattcgcttgaaccctggaggtggaggttgcagtgagccaatatcatagcactgccctccagcctgggtgacaaagaaagactccctctcaaaaaaaaaaaaaaaggagtgaacaccccatccaggtttttaaaaaggtaatattggttgatgggtacagcaaaccaccgtggcacatacatatctatgtaacaaacctgcacattctgcacatgtatctcagaacttaaagtagaataaaaataaaataaaaggtaatattatttttcagataattcactcatatatttcttccaacattttattaagaaaaatttcaaacatagagttgaaagaattagacagtgaacattcatatacccacctactaatgcacacttgttaatatttcactatatttgctctatcaggaatctacccatctctccatccattaatacaacttatttttttaatacaacttattttttaataaagcttttcaaattaagttgcatatatcagtacacttcccttaaagtcactttagtgtgcatgccattagctagaattcaatatttgtttgtcttgttcctctctaggtaacatttacatggaatgaaatgcacagatcttaaaggtgccatttgctgaatttagacaaatgcatactgtaccccaaacccctatcagggtatcaagcattatcacctcagaaagtttccttgcatcgctctcctgccgattgctgcctgcccaccatggacatatttttatatccatatatatcagtactaacaagcagcatcccttgtcctttcctctacatcagcctcgctccccaaaagcaaccacttacaacttcttaaactatttcttctggtactttcctccatatttttaaataacttgcttttcctgctgttttcttgatcaattttaggcatacacacacacacacacacacacacacacacacacacacacatatatatttattttttttttgagacagaatcttgctctgttgccccggctggagtgcagtggtgtgatcttggctcactgtaacccctgcctcccaggttcaagcgattctcctgcctcagccacctaagtagctgggactacaggtgtgtgccaccacgcctggctaatttttgtattttttgtagagatggggtttcaccatgttgaccaggctggtcttgaattcctgacctcaagtgatccacccaccttggcttcccacagtgctgggattacaggcgtgagccagtgtgtctgaccaattttaggcacatattgactgactttctggtctgatgttttcatagtgtggcctccactgcctggctgcctggctttggatcccagcccttcctctttctggctgtatgaccttgggcagtaacttaacctccttgggcctcagttttctcatttgtaaaatgagggtgataataatagtgctgaggttattggattgttatacggattcaagatgtaaaaggctgagaataatgaacatcacccagtgagtagtcaaactttttcttctcataatcattattatcaagaaagatttagcttttggttcccccctttcaattggcatttatcacaattttttgtgaagtggattttagtgttatttatattatgactatgtaaatactgtttcctttcaagccaagtcatatattttggttacatttcctttcttgtacaactctttgttcttcctggagttactactcgctttgctttttttcatttgctgtttcctcttaacccatccttaattctcttaattctttgacaccctcagtctccccatagttaacattacacatcctgaaactcttcaagtgcttttaaagaagcatccccatccatttaaaaaaaactggagccaatttttaaaatagaatctcaaatacaatctgtaaaataaagatttgtgagcatccactatgtgccaggagctgtgctaggcagagtgggaaggtagccaaataggggatatccctgcccatgtgggtttccaagagggatgaaaactgaagctccacacccccagcctctgcatttaccggggaacacctcagcacctctaggaatctcaggacctcagggagcccagatttacttatttgtaaaatgaggatcattttgtcattctgcaatcactccttaaccatgttgtctggggctgtgttgtggctgctgggtatagagcaatgatctccccatcccttgaggggctcacaagagctgtgggatagagcggaggctgtggattgcagcggagcaatgggagctggggagcgggtttcccagaggaagtaccataggacgaagagggtcttggtgggtaagggcagtaaacggctgttatgttccaagggctgtgcgaagaacttccatgtattgtcccatcaaatcctcccaaagacccattgaaaggggtcatatttttatcacaatttcatagatggggaaactaaggccaggagagtccaaggccagggtcacacagctaataagcggcagaggcagtatttgaacctatgcagttgggttcttaaccacacactgcactgtctctcacatccagatgcccagctcctgtccccacctcatcctgtatctgcctcgtcctctcctgtctacccactggtgctaacctctggctcattccatgcccttcgctttattcatccattcattcaacacaaatctactgggcgccttttccacgcccaaccctgggctgggcagtgccagggacatagagcttgggcagtattgactcacccattcccagataggcattgacattgacatgcaagcggccaggaaagttgtctaaataaaggggtgtttggggttgagtgatggctgtgtgtatgtgtgtgtgtgtgtggcctgcaaggggtgtgtgtcagtgtggcagcaacagactttctgtggaggccatttatgaaggcatatctgtgtacccttgagagtgtgttgtctgcagagggtgtgtccaccaggtatgtggatcagtgaggctctgctgcataacaaaccactctaagcccagaagcctaaaaccacttattagcctgtgtgaagtggcagtctggcctgggcttagctgggcagttctggttttacctgggttcacttgccttgctgcagtcagctgagggtgggggctctgggagggcttcactcacatgcttagcagttggcaggctgtttgctggggtgcctccatttgctttgatgaggctggcttgggctcatgcttatggtgacctcagggttccacattcagcaagagaagataagctccaacgcacagtgcattttgagcctctacttgtgtcaagattataaatgtcctaatagcccaagtgacatgtcaagtcagattcaaaggatggagaaatagactctctctctctctctctcggttgtgtttttgttctttgaaaacaagcccggcttgcctggctccatcgcccaggctggagtgcagtggcgcgatcttggctcggtgcaacctccgcttcctggttcaagcaattctcctgcctcagcctcctgagtagttgggactacaggtgcgtgtcaccacgcccagctaatttttgtatttttagtagagatggggtttcaccatattggccagactggtctcgatctcttgacctcatgatctgcccgccttggcctcccagagtgctgggattataggcatgaggcaccgcgcctggcttagaatccatctcttagtcacattacacagggcatgagtacagatatggaggaattattgtagctgattttcaaacaacttacctgtgtgtgcaggtaaagaactagggacagttctcagttttggaaataaaaaaaactctgggctgcagtcctggctcttccgtccttgctgtctgaccttagtcaagttgtctcattctctgagcttccgtaaattggataaaattgaatgaaacgagatgatctttataaagtgcttgtgctactcatttgtttacaaacgcagcacatatttattgaggcctcctatataccaactactggtcccaccccgaggatattgcagtgaacaaaatggaccaaaacacctgctcttgtgaagctcacagcctaggttgtagacagatgttaattgatcatcctaataattgtatgaccattgagagtagattccggaaggagagattgctgacctggccaggttgatctgagaagccaaagatatttaagctgagatgtgaagggtaggtaggagacaacgaggagaagaaagataggagtggaaaatgattctagatggagggcatgtgcaaaggccctgtggtgggaggagtagattccaggaacacagagaaggtgggtggggctgggcctgaagcaccagggccagatggtgtggggctgctggagcctttgaacaatgtgagggtctgtcttgccaggcagcctaaaataaaaccgaaaggcctaactgctccacaaggccctcatgatcggggaccttgttactcctccagtctcccctttacctactctgctgcagccatgctgcctccttcctgttccaggaacaccctggacacattcccacctcagggcctttgcacttgccattgcctttactagtatcgaccctacccagatattctgatgactcattctgtcacttcatttccatctctgcctcttcaaaggggccttccctaccaacccaccacaacccccctgcccctccagctaagcagtcagcatccagcagtctctacttccctggcctggtttatttctcttcctagcacatatcacctcctggcttatattaaccagaggccacattgtctgtttctcttctggatctctcaccagagtgcagctcagcaggcagggacttggccttgctctaggctgtgtcctcagcctcaggggaagagtaggcattccataaacatttgtgaataaagaaatgagtgaaaatgagtgagtgaatgctggaaagaactagctcctggaaattaggaggtctgggttcaagttctagctgggcgatcctttctgttccttggtttctccagttgagctgtgaggcatttgtggtctctagggaggttctaggacaggaaaggagtactccaggctgtggagggggcctatgtaggaagaagggagctggggccttccctttggccttctggcgtttgaaaatagcctagctcagcccctagcttgggcccctaccctccctggggtgccaagctggagccagggggctctgtctggagcctgccagcctggtgccgggctgggatcaaggccacctgacagctgggccaggcagtcctggaaggttcttaagggcaaacagggcatgctggatgtcccagacctccctccccacctattgtccctcctccctcagtgtccaccggcaggataaatcccttcatcctctacaggcctgcagcccttgcagcttgcaaatctttttcttggtttgtttctaatttcacccctgctcagtagctactttactggtgaggacactgaggctcagagatgacaactgcctcactgaggttacgttgcagttatgattcaggcccaagtcttgcccagccctgtcctgtcaccgcgtgcacgtgtgtgtgtttgtgtttgtgtgtgtgtgtgtgtgtgtgtgtggtctcactatcaaacagtgccctcccttaaccaccagtgccccgggtctctgataagatgtgatgactatgagcacctggagccaggtggcctgggttcaaatcccacctttgctacttctatactgtgtggattgctgggccacccccacctcagtgtctgctaataggacaaatcccttaatcctgggcactggggcactatcaggactagcattgtatacattgcacaggttttaaaaaatgtaatctgtaggctgggcacagtggcttacacctgtaatcccagcattttgggaggcccaggtgggtggatcatgaggtcaggagctcaagaccagcctggccaacatggtgaaaccccgtcactactaaaaatccaaaaattcaccaggcatggtggcgggcacctgtagtcccagctactcgggaggctgaggcaggagaatcgcttgagcccagaagctgaggttgcactgagccgagattgtgccactgctctccagcctgggcaatagagcaagactccgtctcaaaaaaaaggtaatttgttgtcaatatttacacatctaaaccattggaagaataatgtatatataaactagctaatgaacacctaccaagccccaagcaccaactgtatgtccagtacagagccagctgctccaggggagttcgttcctgggagggggcatcatgatgaagtgggcgtggttcccatttcctccagcgtagtctcagaagcgggaagccatgtgactgaggttacagccagggagggcagaggcccccggcactcacccctctggggtccaagccccgctggcatgtgttgtgtccctgggtaggtgtgtcactccctgtctgtgtctccagtgttcctgttggcaaatcaggggtgggacggaggtaaatggagaggccctgcccagtctgctgtaatccaggatctcggacttagtggggccaaagcttccaagttctcctgattagtgaggctgcaaaaaatgtttggcatgttattctctcaccgtttaaatgtgggcaagtaacaacttacatgtaaaattacccccatataccaagcatttaagttatttattatatcattgcttacaatagcaaataattggaaattatttgagaaatggctaaagaaactcaggcccaggtacgcaagggaatcctaggcagccctcaaaagatgtcctgcaaacacctgatgtggaatcacaagatacacaacacaggtcagtgaacaaaacaagttgtggcatgatacccacagtgtgctgctgcttgtggaagcaggaacacatgtccatgtactcttgtactggcacagaaccctggagaattatcctgggaaccctgcatgctggctgcccctggggaggggaacccgagggttgggctcaagggtgggaggcaagactcactactttgcacaccttttgaattttgaatcatgtgaatgtgttatctgtgcagaaaaaataaaaatacatttaaagtaaagtgaaagtagacaagaaacctgaaacagagacggacaagcaagcctgcaggcccagccagctaccgcccccgggcaacctcatgccacactgtgggctctgcccagcttggttttgtggctccaccctctacggtcatatttgggtttccacacacacagcacccaaaggaaatcccagctaacgcacatcaggttctgggctgggccacccgccaaggtggttggtgggcatgacaccgccccgggaatggcgtcgtccaaatgcctgagcaatgacacggcctcagatggaatgatgccactgcccacagtctcacaggccctcccatctcgcctttgttctgcagcctccaggtgggtgtatggacactccaaaacagccatccctgtcaatgaatcagcctgcagggactgaattc

SEQ ID NO: 147 - DNA, 516 bp, Homo sapiens
aagaggacaatggatttgtttttattaatttttttgctaagaaagtttctaggtggcaggtgctgtccggggagggggcgtgcgcagcagacacagcagccaaactgtcctttctgcttccgtctgtctgtgccagccctgccgcctgccagctcttgctccctcagagccagaaggttcttggctccaggcttcctggcctggatgctggcagcccctggggagaggacccaggccccctctagtaatggccaccaccctccccccagggcagctggagcctcatctttggcagggtcccctctcccttttccaggagactctgtgcctgtagccctggtcccagtgaacctggcccccaccccagtggctggaacaggaaggccaggaggcagatgggccagggccaggagacagatggcccaatcccctgcccaccacagcagcttttctgagaggcgggcaggggcagggtttgctccccctggtgctgggatgtggtagagacattgcagc

SEQ ID NO: 148 - DNA, 511 bp, Homo sapiens
ttttttttttttttcatgagcagtgggctaccattattaagcacttagtgtttgcccagcatggtacaacaatctggtaggtgggtagtttatctccaatgacacatggggacaagaggataagttatcttgcccaaagtcacacagccagtgagtgttggaagctggattcaaacccagacgtcagattccagagtccattcttttcaaggctggacttgaccccaccctgacccagggcccagatttgagggctctctctgagcccacctgactttcctccagggtcaaggctggctgggtcccctggagccctctcctccacccccacacccagaggacaggctgcatcaggggtcttcccacccccaccccataccaaggctgctggagaggagcctggcccaaggtggcgctgcccctcttggacctccaagaatgccgcatggagcagcccctcagggctgtagtccctctacacctacattgggcccctccagcctggaccccc

SEQ ID NO: 149 - DNA, 434 bp, Homo sapiens
  misc_feature (1)..(434): n = a,c,t, or g
atatcatgaaaaaagatttagagaattacaagagtttaggttaataggaaacacaaatggaggtggaaatttaaaaacaaaggaatggaactcaactctccacagattgaacccacacaggtgtcactgtttactgaattagcaccacttttgtgcagtgaagacacccgtggctgagatttcttaaatctcactttttccatgcttttcttctgacaaactgaccacggagggagagctctcctcccccctccctatcccagactgctgctgctttcctgcaattctggtggtctttttgttgcctcatctgattgagactntggggaaacaacacagcagcaaaccaggacatatattccctctaaaaacagcttgaaaattacaatacanagatctcaataattatgagatgcagngattntttctttttt

SEQ ID NO: 150 - DNA, 880 bp, Homo sapiens
gatcctcaaggcctgctctgccccgtggagacgcttgctcggatgagctcaggaaacagtaccggctgcgtggcaggtctgggtgttgtgtgcgaggacgtggcctttgaacaccgctgtgttctcagaggtccttaggagatatttttttttgtcttagggggactgtgttaagttcagacaaatcatgctgggtgtggagagagtctgaaatacgtcagtgaagtaagtagcagtgagcgattgtgaatgtgtaatgtaaatggaaaaccgggttttaccgtgttaagttattcactagggagccagtcgtagttctttgtaatcctctttcttccaaacctgctttgctgaaagttgcagaaaaggaagtgtgtggagagaaacagaacccttcagggtgggtcagaggacgccatccacagtggattcgtgttcgtttgcaggtggaagcagtgatttttaggacccactgattaaaaacaaacattcccaagtgtctctgagagatgctgtttatttgttaattaaaaagcttttttctctgtcttttaaattatggtttcatgtaataaggatatttttagtgaaaaatggttttcctttcaaattacagaccttttaaaaaaacttaatttgagcgagtaccttttcattgacactttcctgtttctaaccttaggaacagaatagcgttggagacacgacgtttcagttactttgaaacctgccactccattggttgtgatgctcctttacataatttctgggacaaaaaaaaagggggggctaaataccgggggccagttcgtccgtttgtaagggcccaagggggtaaaagaggggggtaaaggggagaagggcttggacccccggggag

SEQ ID NO: 151 - DNA, 514 bp, Homo sapiens
  misc_feature (1)..(514): n = a,c,t, or g
tttttttgctcttagaatagactttattgactttagccaagggcaggccctgagatgggggtccagagagaggggcttggtggggctacgtcctgngggccaggttggttctgaggggtagaaggccatccacccactcgcacggctgctccaggagggcttgccacagctgcttctcctcaggtgtggaatccatccagggcacctgcagcccatagctgctgccggtgcccaggctgaggcgtgtgccccccagctggcggttggccagggccccatggtcccagagggagagctcggcacaagcctggcgcaggtcagcaggcccaaagccatcgtacaccatggtgtgattgaacacagggctgaggctgcgtcgcacaacccttgtacgctggcggctggcctggctgtcatcaggcagcacgaagcattgtacgtaagtgtccagggatcctgcccgcagcggcaggaggtccagagcctccttcacccagaagtgcagctccccgtt

SEQ ID NO: 152 - DNA, 742 bp, Homo sapiens
  misc_feature (1)..(742): n = a,c,t, or g
ttttttaacatgattgccttttatttattatgcaggttgttgatttacatagggagttggagatgctaaccaagcatggagttttcacatggtctatttctgctgagttcagggacttggagacagcctttaacttctggcaaaaagacaatttcacaaaggtgtttaaaaccatcctttggtttttgatcctgagtcagagacggacatgtgcttatgaaagaaggtagagtttcaacccttaggtaaccttaaaagagcaggaactatgttgtgtgtaagtcatgtgcagtatacaaacttgatattaaatgacaaattggaacaatctttctctaggaatgcctctctttcatagaggcatcacagtgagtctcttaaagccttgatctaggtgtgttacagatgggcttacagagtatgaatgcacgataagaaggaaattggatagggagtgaggatatgaaatttaaaagaaggaagaactggaacaaggcataggcctctttcaatttttcgtggtgtgcagctgccaattcttggacattcaagaaacgctggttgacattatcttttttcttcacaatctgatcaacgttgaaagtcccgctggagagcaaatcttcagccaatgtattcaggtccttgagtgcatnctctcgagccaacatctctctcttncatagctgatgcttcttgagtaggtttctgctgaagccaagtcctgggctgatctttatgg

SEQ ID NO: 153 - DNA, 536 bp, Homo sapiens
ttttccaatttgatttttaatgtaattaatagtgatttaattttcaaaggagcaaataattacaaacaagagaaaacattgctgagatggtgcctggttgcttctattcaggccattgctgaactatatagaaaaaaagtatattcatggtgtcttcattattatgaaaatcacagtaatatgactcatcaggaaatcacaataattttatgacagaaacaatatatttagaacgaatctgtcagtatttgactctcttttgagggaaaaataaatgaaaaccacgttctctggaaagaaataagacaagaaatgcccacagttgcattctgctgttgggaatacatctccaaaattcaaggttcaaaggttatcacatttaattttcaacacttatcaccttcttcttctctcaatttatggagatagatttctacgttcattattcgggattattagaaatttccttcagtttgaacaatgcgtaacaagtattctgtgacatgggtgcaaaaagttgtcattttcaatcaagt

SEQ ID NO: 154 - DNA, 653 bp, Homo sapiens
  misc_feature (1)..(653): n = a,c,t, or g
ttttttttttttttttgttaatggaatgcacaaaaagtgctattttaatagagagacacaaaatattacatattcatgggacttagggacaaaactatgccttggaaattttctggaaaatcacataagctccaaagaagttgatacaaaggcagctaaagatcttggtttgatagtggcaattctaccaatacaaatacaaaggaatcaacaaatggacaactctttagattacagttatgacacaagcaatccacaggcattccagtgaaaactgcacagagctctctctgttgttacttgcaaaaggctagcatggaaatatcttgtgttcatgtgaagagttggcccatatttccttgcgtgttatcacaagcaggctaaggggcctccagtccttatgacataattagaggagagctgggaggaatttccagacaacagccaccttcaccagccagcccttttgtctgatggtccacacaaaactcattgtatgagtcagcaggatctagaaggttcacttcctccacagtggccgacagtttagatgaatccttctatatgtttctgaacccagacccagccaggacttgtctctattcattntctgggctggtctaacaggagataataggctagagagagatgct

SEQ ID NO: 155 - DNA, 530 bp, Homo sapiens
tttaagttttccaataaatttaatcaataaaatatatactggaaatatcacataaaaattaacttacacttcaaagattgtgcagctgacaactcccccaaatcccccaaccctcaggccaaacaagataaaaagaaacaagaaaaaagttgtaacatgaaattgacttgttttgcttggaaataagattataaattagtaaatcaaaatcttgacctctcatgataatcgtggtgtgctgcaggcatcacgatgaaggcggggctgtctgcactcctgtgcttgcgacactaatactgttctctccactgcaccggagcacctttgttcggtatatatatgcctttgttacctctgactcacgtcgcttaaagaccagttttgcaaatgttgttttttaaaagcatacttgtcaaaactgtgatgtaagagaataaaatccttggaggccttgatttgaagctgtgaacctgtagcctaccaaggacagtaaaaacattcccgttgtgaacactgctccagaagcagct

SEQ ID NO: 156 - DNA, 655 bp, Homo sapiens
  misc_feature (1)..(655): n = a,c,t, or g
gcggccgccgctcctcccggcaaagcacatactcgctgaactgggaggagtccacaccgcccccacaggacgcagccacgctgaaacccctctggaacagccgctccaggacctgtaccgagttgagccggcagtagccattgagcgggaagcggatgacgtgcgtggggtcctggttccagccggcgttgacggagttgcacatgacgtctccggtctcggggaagacctcctcgatgagggccttctcgccgctgagtgcgatccgctcgcccaagtcgggcgtgacgcgcaccaccaggcagtcacaggcccggctgcggcgccgctgctcctgctcctgctgccagcgctccagctcgcgcaccatgggctggagctgatagtagcgcgcctcctcgtacagcagactgaagtccttaaagtcatccggaagcagcagcttggacgtccgcaggaagctcaggacgtagcggaaaatctccccatcccggtcaatgaaataatgttgcttcaaactgtccaggacgaatgggtcagtgccattgaagaggcggcttatcctggagtcagggtacttggtgagcgtgggccagcttgctgtgtacatgtggccgcccacatcgatgtgcacaggtgcattggnactggtgag

SEQ ID NO: 157 - DNA, 503 bp, Homo sapiens
  misc_feature (1)..(503): n = a,c,t, or g
gtttagtttgaacaatatttaatctctgatgcttcagaaggcactttgagatcttgaagggccttagggttgagtctttgatggtgactatggctccttagggtgctgtgtggatgtacaagagcactggctaaggagaggtggcagcatgcaacaagggtaagaacctcagctctttccctaaatggcaggctgacccggggttagtcacttcccttccccagcagcactgcgtcagagcttctctgaggcccctcttacctctgatattctattaagactggcagaggatgtattgtgtgggttttctatcactggaactgagaaaaatttaaaactacctgcatcagcacagagaagatctgaaacggttcttgggtgtttataaagcccgtggctggngctcccatcttgatgtcagcccagccctggggtcagtgcagactgagatacggagcaggaaagcaggaagaacgggagtagcagagtcagggacgacagca

SEQ ID NO: 158 - DNA, 565 bp, Homo sapiens
ccttttttttttttttttttttttttccagaataccaaagtttattcaaaaagtcaataaaagcacagttttgcaaatttgtctaaaacgccagataatcttgaacaaaaataaaatgtctgaccactccaaaataggaaaagacaatcttgtgcaaatagacatacacagtctaggcattgtggaaactggctgtgttcccagcaagagatactgcaccctcctgaccgagcagtcaggcttccctttcctagccatcctaagttgcgttctaggaaactctggatctcagcctcatctccagctttgcctggaccttgctagggggagggagggacaggagcacagaggaggagaggagagggatgtgatgtctttcttaggaaagaaaaaaaggcacagtgatgagctataaaggtagtgatgagagctataaaggtagtgatgaaagcaaggaataattttcattcaccccaaatcctacggcaagctttgacaatgtaacatctttatcttgtggttaggaaaatggacctagagagattatgtggtttgctcaaaatca

SEQ ID NO: 159 - DNA, 575 bp, Homo sapiens
ctggctcacaactttaattgattgctttccctccactgggcccaccgggtcggcttacatagctcatagctcagtgctgctgaaatagacccagggcaagaaaggtatgaacaaccagtgaatgccactggagcataaatgttcacaaaattgtagagaaggggtgacaagaagcaagcagtggggcagggagtgtcactgatgtccgaaaccccgggtcagaccaacacgcagcacagccactcggccagagagagctgaaccatgccatccttgtcttcgtccagaaggctgaatagtttgaagagggtctccaggcggatcatacaagccacgaagctgtcaaagttgatgccaagcttgctgcacgcattcccgaagggcaatggtctgctgcacctggctgttgagggtgaaacctgccttcctgagggctgtcctcatctcgtgggcatcgatggtgcccgagtggttataatcagtttcccaatagatctcctaaagcaggaaagaaatcccaagtagaaaacaaccattcacggcccctgccagaaccatctccctccaccacactg

SEQ ID NO: 160 - DNA, 497 bp, Homo sapiens
attctgaccaaagcatgatggttattccatttacataggaggtggcattgtagaaaataaaaactttctcaaagagatatgaattaaagaaaagttagagtaaggtgaatacttatttaaacatacctttagagtgagggtaagcccccttcccaacccaaaatgaactgaatgagagagaaaaagaggtccagagtagtttgtggagcgatgtttccatctctaatgccactcagctcaggagcaggcttcagacactgcctttatctttacagaaagccatgggaagggaaatgtctgaggtagagctcagcgttgggcatcatatggctaatcactcagaggtcactaatcactctcccttttcttgtttttcagtgaacgagataattgggagagacatgtcccagatttctgtttcccaaggagcaggggtgagcaggcaggctcccctcccgagtcctgagtccctggatttaggaagatctgatgggctc

SEQ ID NO: 161 - DNA, 500 bp, Homo sapiens
ttttttttttttagaaatttaaaatttagttgaaatataaaataaattattgccagaaacacaaagggcacatgaatacaataggggaaacagcttaatgggtttctgttctctgaaaactcaaggcccatctctgagtgataagagtaccctaacaggcaaagcactctgaggtccgggaccaggaagacagtgctactccacctactggcggtctggcactatctgtaggctggagttgggctggggatggtacattcaaaatggactttggtaaactaggggacaacccagacaaacactgcagaaaggaggaaggactccctttccagcatctcaaattcaaggctccaagttactgggcttgggcaaagtcacacattttctcaacaaaggccaactgctgacaatccaaattttaaaaacactgccattaggccaggcgcagtggctcacgcctgtaatcccagttctttttttaatgaaaagaatttgacatt

SEQ ID NO: 162 - DNA, 787 bp, Homo sapiens
ctgcagcaggagcaggagctgttacccttctaatccccacaatgaccccagcctaataatacaatgatccccaagtagaaccaggggcccaaggccccctcgtcagctgggctcccacctccaagctgacgccctcaaccactctgctggggtgagcaaacccaggccccacagctggctagcgggacatccgtgtccacgattggcgccatgtgttttaagttgcagcgtcaaaaacatgaagagattgctttagcaaatatttacccagtcctgactctgcacatggcatcgttctaggagcccaaagatgttaacttgtttaataatcaagccctgtgaaggagtttatagcatctgtggattttggtacccacggaggtgctggaaccaatcgttgaggattccaaggacaactctatgatgcaggcacacctgtcctagctgctcaagggtcgtgggatgcaggtggcacggtgcacgccaagatggctgtgtccacagaggagctggaggccacggttcaggaagtcctggggagactgaagagccaccagtttttccagtccacatgggacactgttgccttcattgttttcctcaccttcatgggcaccgtgctgctcctgctgctgctggtcgtcgcccactgctgctgctgcagctcccccgggccccgcagggaaagccccaggaaggaaagacccaagggagtggataacttggccctggaaccctgaccctgtgtctcctgcccggtggcagtaacaaagccttctgtctgccc

SEQ ID NO: 163 - DNA, 514 bp, Homo sapiens
aaaggcaaagaaggtttttatttaagtgacaacatttgagagctaaaaaccagctcacatcaaaatcaagacccagttgttgaaatcttttaactccataatgctgtttttgtcttgttagaaatctgatatcttacattagcgtttctaacggattttgtacaaggcagccataaggaatataataaacctttttcaccacagaaccatctgtcacagataatactgaaagttacacacttaggaacagtcagaccacagacaaggtcagactggctgccaccaccaagtaaacaactagaaaaggacagcggggtccaagggtgggggtccctgtgcacgagtcgccctcctctggcctgccccccctcgggtcacctgcttctcctttgccccaaagagggtggagtcaaatgcagattttcctcccaactgcctgttagtgtctcaacaaggagagcagagcccaggtcaggcctcactgcttggacttaaccctaactatgatttttac

SEQ ID NO: 164 - DNA, 571 bp, Homo sapiens
tagtgactcagttttttattgaataaaatggcctacagcctgatgacagtaatatggcccttgggttttgaggaaaatatcatgttgtaggttggccaacaaggagatagcagtccagctgaaatttgttttcttatactggctttaaggcagtgattagaaaaggcctaagaggtgggttctgtaagggattgctggaaggaaagtaggaatatggaaagtcatgagacatatactgtcatctcttcttgcttcctctcaagtcacatgcaaattcagggagagttagtatgaaacacacaatggaaatttgggctctaacatatgcaatctgattcttcatggacttcatttggccatatcagttccaacaatttcagccaatgtttaaaaatcttataagcagataaaattttagtgtttcaacaagccatttcctatctttcattctgaaaatccattttaagtcatttttttaacagcataggggtacaaattcagcttctgtccaatgaaatacagaaaaggatatcacttttgtattagttcaggctgctatgccaaagaacca

SEQ ID NO: 165 - DNA, 559 bp, Homo sapiens
tttttagggtatcaagattttacattactaattctgaattcgttatcctttgctttcagccatattaaaactgaaagccttccatacctgatgtttttctatctcattatacagctttcctgtcagatcttcttttagggtgactttgaagaatcagaacatcagggctccaactctcagtagagccagtaaccagcttcctgatttaaaaaaaatcacctttggcctaattttgtcacttataaacagtggtattgcagtaccctggtatgattagttatgatatgtttaacaataattttaaaataccaaagcttgtgaattattttactttcaaaaaattatgtaggtaggaatggtaattctaaaggcactgtcgtttgcttacacattctaacatatttctaataagaaagtacctgctttcttaagagaaaaagggataagttaccaaaagcagcacgttctcctgggctcataccccggattcatccatgaggccacttccattgtaaagcttttagcatctcttgatttctcttcacactgaggcacaaag

SEQ ID NO: 166 - DNA, 933 bp, Homo sapiens
atggcgctgaggcggccaccgcgactccggctctgcgctcggctgcctgacttcttcctgctgctgcttttcaggggctgcctgataggggctgtaaatctcaaatccagcaatcgaaccccagtggtacaggaatttgaaagtgtggaactgtcttgcatcattacggattcgcagacaagtgaccccaggatcgagtggaagaaaattcaagatgaacaaaccacatatgtgttttttgacaacaaaattcagggagacttggcgggtcgtgcagaaatactggggaagacatccctgaagatctggaatgtgacacggagagactcagccctttatcgctgtgaggtcgttgctcgaaatgaccgcaaggaaattgatgagattgtgatcgagttaactgtgcaagtgaagccagtgacccctgtctgtagagtgccgaaggctgtaccagtaggcaagatggcaacactgcactgccaggagagtgagggccacccccggcctcactacagctggtatcgcaatgatgtaccactgcccacggattccagagccaatcccagatttcgcaattcttctttccacttaaactctgaaacaggcactttggtgttcactgctgttcacaaggacgactctgggcagtactactgcattgcttccaatgacgcaggctcagccaggtgtgaggagcaggagatggaagtctatgacctgaacattggcggaattattgggggggttctggttgtccttgctgtactggccctgatcacgttgggcatctgctgtgcatacagacgtggctacttcatcaacaataaacaggatggagaaagttacaagaacccagggaaaccagatggagttaactacatccgcactgacgaggagggcgacttcagacacaagtcatcgtttgtgatctga

SEQ ID NO: 167 - DNA, 557 bp, Homo sapiens
ttttttttttttttttttttttatagcaaactttttatgtcagaagtttattttattggtaaaatattaaataatatacagaattaaaaactgcacttacacttctgagaagaaataaatcttggacaaattatatgcttgttcctgagattccctaaatttattccagtagctgggcactcagacagtacaaacctttataatataatccttttcacaaagtattacaaagtttctgcagcttctttagttgtacacacatacagacacacactcacacatgcatatacaacactcatacacatatacacagtaaccacatacatgcacagaacatgtatgtgtgtgcattaaaaacaaagaagatacaagtcccacattttagtctgcagtgataaaactatttagcggaggtctccaaatcagtatgtagtagagtgacttgtcacacagctgcaaagactgtttcagtatttccatagtaaacctcattttctgaggtatggtatttgagccttaaaaaaactacattacacttagcaaacctgacatacaag

SEQ ID NO: 168 - DNA, 422 bp, Homo sapiens
tttagattgtgatcactataattgacaaaattgatgttagtgaattatatttacaaacacttcacataaagattctatgtaactgatagttcattttatttttataagccttttgtaaacatactgctatgtaatatgagtatatataacatactaaagaacatatctttttagtccataaccattacttctaatggattataagtatacccagattttgaaatgtatacaaagaaaatttaacaaataataacatgtaagctatacatgtcatattttacctgttacccatcaatctgtttctgtttttaaaacacagttttcaaacactaagtctgtgattaaacaatgacactaaaattaaattgtttatatgtcctacctagttcaataggcttaacaaacatgtatgcatatatgtt

SEQ ID NO: 169 - DNA, 665 bp, Homo sapiens
actattctaaaaatttaagatcatgctattacctttaagaaaaataatagctttacgatggtttttaattctccatatgaaagttaaagacttcctttttggagtccaatggctgttaacataaatctaaatcctgagtaacctacgagatgcagatcacctggccaatcaagaggctccagggacatgtttacgacatggaaaaaccatgggtgttttttgcccaaaaagagtatgttccctgatggaaaaggcaggcttgagttcattatcttgagaacaaagatcaaggcaactgcagtagctgcttacctgtgtggccctgtattctctcactgatttttgctccaaggaggtcccaaacgagcagttcaccagactgactgccagataaaacggaatttccatcccagacaaagcacctgcaagaatgatttagaaatagtcctttcttcatcatgaaggaaggatatgttgaactggccaatgtaagcccaaatgaagtgatcatgaacatgtctgtaaatgtcttcgcccccagtaactcacaaactatacctctggggctcatctgatgtcatggaagagatgagcattcctgtctgcacatcaatgacattaagacagccatcttgtcctgtgctgaggacatggccactatctgc

SEQ ID NO: 170 - DNA, 1933 bp, Homo sapiens
agaagccacattagggccattaaggctgctagaatttagaaagaaaacacacagcctcccagagtgctgggattacaggcatgagccactgctcccagccttccagaggaattttaagcccatgtccaaacattctgtttgtataaatatattctaatttttaaataaatagtttctacttttctgaactttatattttttcttgctataatggattttcataatcagaaaagattaaattagtaatcatgaattgcctttaatatttggcagtaagtcaatgaaataataaggcacttatataccatctttgacatcattaaaagtatcaaatcccattaatctaaaacttctttaagcattttgaaagcagaaaatgtttacatggttctttcagttcctcaggctttttgtctaatgatgcgtgacttaggataagatttgaattaagtgcccagcttgaaacataataatttttctgtataagccacagatcctctacctcctttgtgttaaagcctttatatgaaacaattaagtagaagcattcaatagtgtgtcattaactgttcatactaataaatggatacagcacattttcatggcctgtaatgtagaacatactatataaagttctcagtttggggatgactaggtttctggaaggaatagaatgctaaatcaatggatggcattgggctgagaaacactgctgctactaatcagccttgaatgtgtaatgtgaacatgcaaaagagaacatgcatacactcaaatttgtacaatgctataactggaagttgaaggacttgaatttttatattgtgctattgttatgttttctgtaattgtttatatctaaggaatttttgaggtaatataaaagaaaaagagaataatgaacaatgatgtcactggagggtttttacattaaattagatcatttttcttcttattcacaataataatcttaatctttaagaattaattataatttaatattataattcataatctttaagaattaataattataatttaatattataattaataatctttaagaattaataatataatttaatattataattaataatctttaagaattaataattacaattaataattaataataatcttaatctttaagaattaataataatccttaatcgcaataataatcgcaaggaggagaagtaagtccctcctccttctgtatgaacttttctcccacatgctgctgtatggtttagtgagagtgaagttctaaagaacatcaatatgattggtgggataatccaaagacattttttcagaatcaaatggcatgtcgaaggtttgtttcttgcatatgtatttactggtccacagcacaaaataaagtgaccacatatacataggaaagttgaatttgtacacatacagcatctgaaatgtatctgatgttcagcatcaagatttcactgaacattgtagaaatgtgtatcttttgcatgtatattttacattgattttctatttatgtacatctagaaagttttaaccctaataaatagttttgtaattttgaataatagtgtcagtttatatgtgagggagtagagacagagaggttagcactggataataattagtaaggccaaaggagaaaatttcatagaaaatattgttgttgtcataatgagtacagcatgaaaggcttcctctacaagacactagtcaaagagttgagagctgcggtttctaatctttgtccattactcccttactccctatgagactgtggacctgtcacttggcctctctggtcttcagttttctcaccagtaaaacaaggaacttgaaccaaatgacctctagtgttccccttgggtttaaatgtctataaatgttcaatgactagaaaaaaaaaaaaaaaaaaaaaaaaaaa

SEQ ID NO: 171 - DNA, 1816 bp, Homo sapiens
ggaggccgaggaggcccccggggcccggccgcagctccaggacgcctggcgcggcccgcgggagccagggccagccgggcgaggggacggcgactcggggcgctcccagcgagagggccagggggagggcgagacccaggaggccgccgccgccgcccgccgccaggagcagaccctgcgtgatgccaccatggaggtgcagcgcgggcagttccaggggcggccggtctccgtgtgggacgtcctcttctcctcgtacctgagcgaggcccaccgagacgagctcctggcccagcacgcggccggcgccctgggcctgcccgacctcgtcgccgtcctcacccgggtcatcgaggagacggaggagcggctcagcaaggtgtccttccgcggcctgaggcgccaggtgtccgcctccgagctgcacacgtccgggatcctgggccccgagaccctgcgggacctggcccagggcactaagacgctgcaggaggtgacggagatggactcggtcaagcgctacctggagggcaccagctgcatcgcgggcgtcctggtgcccgccaaggaccagcccggccgccaggagaagatgagcatctaccaggccatgtggaagggcgtgctgcggcccggcacggccctggtgctgctggaggcgcaggcggccaccggcttcgtcatcgaccccgtgcgcaacctgaggctgtcggtggaggaggccgtggccgcgggcgtggtgggcggcgagatccaggagaagctgctgtcggccgagcgcgccgtcaccggctacaccgacccctacaccgggcagcagatctccctcttccaggccatgcagaaggacctcatcgtccgggagcacggcatccgcctgctggaggcccagatcgccacgggcggcgtcatcgaccccgtgcacagccaccgcgtgcccgtggacgtggcctaccggcgcggctacttcgacgaggagatgaaccgcgtcctggccgaccccagcgacgacaccaagggcttcttcgaccccaacacgcacgagaacctcacgtacctgcagcttctgcagagggccaccctggaccctgagacggggctcctatttctttctctctctctacagtgactgggcttcctccgtgcagttttctgcaactctggagaagtggaggcatacttgtgtgtctgggttgtttttttttttgtttttttttttttttgttttgtcattctttaattttgttgttttacccattcgttatctgtggaaaacgttttaagttgtcatgtgacagaaacttttcctttgtccatcgaggtgtttcataagttttttggtgtgttttctgggtcgtctatgtgtcatatggttttacttttctctcctttttcgttttcagaacatttttctgtctgttttggattcactgcttccattttacagaatgtcactctttagactctcagtccatcatgccatcgggtactcttgttgcagtgtaatttttattacatgcggttatttccctaacgatgtgctattcacgttcatcttcaaactcattttccatcagccagtgtctactatttagtgccctggctctatttcggtcctcctccccgggctttccctggctgctgtgctggccaaaagcatgggctttattctctccattggctgctgctccaccttagaggtgtgacctcactagcgttgactgagcgagtctgttgtggagaagaactttttgtagtaatttactaggaaaaattctgaacaagtaaaatatgaaggaaaaaaaaaaaaaaaaaa

SEQ ID NO: 172 - DNA, 1816 bp, Homo sapiens; identical to SEQ ID NO: 171

SEQ ID NO: 173 - DNA, 471 bp, Homo sapiens
ctttttttttctttttgagacagtctcgctctgttgcccaggctctgtcttccaaaaaaaaaaaaaaaaccacacacacacacaaataactgatcattgattctctttcccttcctgcagtctcccaaggtgtcaattaggaagtgccaaaatactaaagtctcatttaattttcctgatcaacttatgttctaataattaatgtggaaggagaggaaagaaagagaaaacaaatgagaatctaaggtagtaaacagcagcaacttagcgggaataaggggaacatggttctcactaaccaaataggactgataacgcttccaaaaaataaaatgttaggtgaagggaaatatggaaatatgttttactttctactaatagctgcaggcaggaaggtccaaacgcagggtttaactaagctgggggagtaggggagatgtttagagggaatactgaaagagaatcagtttc

SEQ ID NO: 174 - DNA, 720 bp, Homo sapiens
aagataacatgcctgagggagagcctggtgcctttgctatgaattaatatgcactttctgaaaactctaaagcctgggaaacattttagtttttgttaaggttctaaactgtgctacagatacttgtaagacttttaaaatcgagagtaagtatgttcttacataaggcctttcttaggaattatgtgtatataaatctttgaaatatctttatatacctgagttttaggttccaactgtgttagacatgagttagctagatccatggtctctagatggtttacttaaataggccaggcgcagtggctcacacctgtaatcctagcactttgggaggccgaggtgggcagatcacgaagtcaggagatcaagaccatctggctaacagggtgaaaccctgtctctactaaaaaatacaaaaaattagccaggcgtggtggtgggtgcctgtagtcccagctactcaggaggctgaggcaggagaatggtgtgaacccgggaggcagagcttgcagtgagccgagatcgcgccactgcactccagcctgagtggcaaagtgagactctgtctcaataaataaataaataaataaaaataagcctgtggctgtttgagggaaaagtaacatagtctgataattaattatgataataatatgatagttaaaaatacgtcattttaaacgatttcccagacacacactaaattgggtttatgaa

SEQ ID NO: 175 - DNA, 400 bp, Homo sapiens
ttattgttttttaaaaatacaattttgaaatttattgttgaaaatggacacatggaacaaaccaaaccttgttttatcatgtaattttcagaaaatatgtgatccataaagattaaaagaaagttgtattaagtctggcagctttagtattaacttgaaataaaatatggcaagctttccacgtcctcctttatttccacaatccatatgtacgagctagattccagtcagaacttccacaaatacttcactctttggtagcagcggttataaattacgcctttgctaatttgcgttgttcccaaccaggagaaacattaccacaaaaaaagtcagtttcatcctgcagtgttcccgcagcaaccatattaaagctgaagaataaagctcctttgtagta

SEQ ID NO: 176 - DNA, 222 bp, Homo sapiens
tttttttttttttttttttttttttttttttttttttttcctttgacagtgaccatttattacacacatcagactgggggaagaccattgacatagctgagcaccaggtagggtgtcctgggtattcgggcatgagagcagcaggggcctcctgacgcgggcaggagaaacatggcacccaccaggaggaggaagaggaggaagaggataaggaggaaggtc

SEQ ID NO: 177 - DNA, 559 bp, Homo sapiens
  misc_feature (1)..(559): n = a,c,t, or g
aattcgcggccgcgtcgacgctgcgagaagacgacagaagggccattctactaattttaaagaacatcttggaattttacactcttggaatcatagtcgtagaatcctttttttgagacagagtctcactctgtcgcccaggctggagtgcagtggccagatctcagctcactgaaacctcagcctcccaagttcaagtgattctcgtacctcagcctcctgagtagctggaattccaggctgtactcactgctttgctcatatccccgctcattaccagggacaggccagcacccctggcattgcatctcacatatccactgatggatggagaacagactgaaattcagtgccttagagaccacacactccaaccccctcattgtgcagatgggaaaactgagagccatagaagggaagtggcttgcccaaagccacacttactgttttccccacactgtaccacaaactttcaccattcttcaggtttggaaaaatactaataaactgatcaacactaaaaaaaaaaaagcggccgctcggttgtngcgcggccggg

SEQ ID NO: 178 - DNA, 421 bp, Homo sapiens
aattttcaaggcttttattggctgtagaaatggtctgggagacaaatgtcctaaaaatccccaatttcccttaactggcttcacaatctttggcaagtcactttacctctctgagcccccatgccctcatctctgcactaggtctgccttgacacttttgtttgcagggtttaggaccagatggaagtgccttgtaaactgaaaaataccacattatatatcatatcacattattatactttctgataaatggttacaaagctatctgaaatagaagtttacattttatttctgattaactttcaatattaagtgatagaacctaagaagcaaaagcgaacataaaattcaactggaaaatttgaaagagaaatggttttttctctaggaaatttgcactaataactttttcccaccatcc

SEQ ID NO: 179 - DNA, 462 bp, Homo sapiens
tttcactttttcattattttattgttgttttagtagcattttgaggtgaatgtatgcataatcagtgaattagacaagcatgcacatacatgatatctgatcaaacatttttttgtctctcatcatcctcataaaatttattcagtgggagaagctttttcttccatcagatacattccagttgtatgccaacatactcaggtaagagcaacattttggtcattttaaatagtttggtaattatgactcccagtcgcctacaataagaagaaactacaataatttagtactaaatttttcttccctctccaactgagtcttgtgttgagttgcctacttgcgctagcacatcttcccttgctggttgacatttttgctaagatttctccctctccttccaccccaccttggacacggaggtttctggcctccctttccccaggtccccaaaaaagaaatctg

SEQ ID NO: 180 - DNA, 526 bp, Homo sapiens
tttgacattttgtttattttattttaaatattaatatattcctcaccttgttctggggaggatttgagactgctcatatgatatgcatgccataaattagtaaaatgcaataaaaaataaagcatcagaccacagaaactatgccatgggtggtatagcaggccgtaggcggctgtaaagttgatccggaattggccttcagtctcttagtggtcaactgaaagggtgttgtggtcacatacatggctctcattcacaagagggcaatgtaccagctcttagaagaagcaaaactttttctagtacttgactctaaggaaaattacccacctcggcccagatgaaagagactagcgtggataatgtcctcaaaacatggcagcaaattcaggctcagtttctctgggctgtgtcctgcaggaagatccaaggtggtcaccctcagcctctgctcagtgagagcactgaaatccacactcccttgagcaaagaaacgatctgtatgtttcaattctttcttcagcac

SEQ ID NO: 181 - DNA, 350 bp, Homo sapiens
ttttttttttttttttttttttttttttttttttttttttttttttttttttggaaacagggcctcgctgggtggccctgactgctctaaaactccggagttaaagggatcctcccacctcaccctcccaagtagctgggattacaggcatgtcccactgggcctagctgaaacatcagtttctgactgaaggggaaactacaacaactttagggtttcccttaaaaggattacggccatggggaacttgactgagtaaacaaggctataaataaaaagcttttccaaaacattaaccatgggaagcatcattatccccataaaaggggggcatccaggttaaatggccc

SEQ ID NO: 182 - DNA, 400 bp, Homo sapiens
tttttttttttttttttcactttttaaaaatctttattaataaagtaattcattataatttttgaaaaaaaaaagttttaaaatggtctgccaacatgttaatgtaggttaggccatccaaaagacaaagcaaaacatcaacattaagtcataggctaggattatacaaatgagaacccccaccttatacattacttaatataagttaactacaaagagcctctccacttacatttttatcatgcatcttacatttaaaggcccttattcttttatagaaaaggtcataatacccaataaaaaagaatctgtaatatccctgatgcagcaacaattgatcacatgctttcacatgtgaccacaataggaataaaataacagcgtaaagaaatttgaaagt

SEQ ID NO: 183 - DNA, 336 bp, Homo sapiens
aaccggtccttctccaacctccaacttttggtttttggaaaaatgtttctctaacacctcaacagtttaaggtaatttagtacacatatatcagtattttggtgatctgaaaaagcaacccattttctaaattcatatttttcctaaaactttactatgtttttattttaagaggttcctgttatatacactttttacacatgcaaataaactttataccaagtgagtaaaaaaaaaaaaaaaaaaaaaaaaaaaaaaaaaaaaaaaaaaaaaaaaaaaaaaaaaaaagaaaaaagaaaaaaaaaaaaaaaaaaaaagaaggaaaaaaaaaaccaa

SEQ ID NO: 184 - DNA, 628 bp, Homo sapiens
  misc_feature (1)..(628): n = a,c,t, or g
cggcaaaaggggaagcccaaggcgtaatttgggtaccnccaggcacaagtccgaccgttgtaaaacggcggccagttaatttttttatatttaaaaagggtgaggataagatagagaaagtgtttttttttttttagaaatcccacattttaatacattgccatgcacataaggagtcaagtaatgctgaatacaaaatagtcaaatatccaaaatgataaagcagattttccagcctgatagagatcatgctcacagatacaagggaggcaaacatctgtacagtttcatttttatccattttataagagtcatgcccccctcaactctttttgaggacaactggaaacagaaggaaacataagaatatacaaaggagacccaaagggaattggcaagttgatagctgctgaagatatggaaatcggtggttcaaaattgtggtacacaataattcttatgtttagagaaaaaaagtttctaaacatcttatgccctggaagccaggaaactaaagtggatatccaacagaaaaggcactcttgttttaccacataacttgattgcctcctcctaagtctagtcctgggagtttttctaggatgcacagaggaaaaaaaaaaaaaaa

SEQ ID NO: 185 - DNA, 997 bp, Homo sapiens
cattagaacacaccatacaaatgttagttctatatggccaagacatctgatttaaatttgatgaaacacagcatgtcattgttttctagaacttaaccattttcgcttctagaatttcagtatgattgtaggcaatgccactgaggcagctgtgtcatccttcgtgcaaaatctttctgtcatcattcggcaaaacccatcaaccacagtggggaatctggcttcggtggtgtcgattctgagcaatatttcatctctgtcactggccagccatttcagggtgtccaattcaacaatggaggatgtcatcagtatagctgacaatatccttaattcagcctcagtaaccaactggacagtcttactgcgggaagaaaagtatgccagctcacggttactagagacattagaaaacatcagcactctggtgcctccgacagctcttcctctgaatttttctcggaaattcattgactggaaagggattccagtgaacaaaagccaatcaaaaggggttacagctatcagattaaaatgtgtccccaaaatacatctattcccatcagaggccgtgtgttaatcgggtcagaccaattccagagatcccttccagaaactattatcagcatgggctcgttgactctggggaacattctacccgtttccacacaatggaaattgtcaggtcaatggacctgtgatatccacggcttattcaaaacttattccataaatgaagctttctattttttccaagatagaagtcaaactgaaggccagctcaatgtctgtatggggacttcaatcctttggcggtggaagcatgccaggttgtcacctattgaaagtgaactaagaacattggtgacggtgcccatgttactcacatgaactcctctcacgattgtgtccccatttggtcacctctacaaattttcccgctggacaactgtgtaccacatgtgggacacggtatccccggacacacactaagacg

SEQ ID NO: 186 - DNA, 447 bp, Homo sapiens
  misc_feature (1)..(447): n = a,c,t, or g
tttgattgaaaaaaatatgaaatttaattttagacatggcaagttcaattacatcacttcatatcacagtagaaaatataatttgttctaccatgggaaatagtataatggaatagatcacaatagtagtataataaaatagaatatccaagtgcaaaaacaattttcaagtaagtacacacactgtttgaaggtactttattaagatcaaagatttttcattacatttatttataaatccttcctagtcaaaataaaataataaaaatctgtatctttagaaagaacatagttttgtaagtctgagaaggttatgtttgtcagtttcaaattattacagtttagatacattcaatcattacacaataccaggaaggtcagccttaaagataccaagaacttccatanttgtcagtaaaataagggtaaaaaattaaattttacttt

SEQ ID NO: 187 - DNA, 521 bp, Homo sapiens
  misc_feature (1)..(521): n = a,c,t, or g
agcgcaganngncagangcngananaaatcactaccaatataatggattttatatatcagattgctttattctggatatcatggtaacaatacagaaagtatacataatttcccatttctgcaagtagtcatgactgctgaagaaagaaaaacttaaagctacggcagaattattttatcggaaattctgattttgtttttaatttttgataactttttactaaaggtatgaacacacaaagagcttattttgttaggcaaatacacattaataagaatgcctagaagaggactgattcttcacacccggacccactggttgctgttgggccttgctttgctcttgcagtttggtattatttatgtacctcctggaatgtgccccccagactgatggaaatgcatctcttcctgggtgttgttggggaaaattatggtaaagagtattatcaagccctcctacaggaacaagaagaacattatcagaccagggcaaccagtctgaaacgccaaattgccca

SEQ ID NO: 188 - DNA, 342 bp, Homo sapiens
tttgacacttgatagatgtttttattgaaattccttcaccaaaggaatatttacttgtgaatctctaagcccacacacatacacaaataccattctgtacaaacatacgtatttaataatttgattcttctgctcaatactcaaagggggctgggaggaacagtttgtctcctagggcatgacatagactggacagtctttttataagagtgatacaactgggaagggagaacgctgtttcagaagataactcagatcctcttcttcaggaaagactgagtttggaacaccagggctttttttttttttttttttttttttttttttttttttttttttttt

SEQ ID NO: 189 - DNA, 710 bp, Homo sapiens
gaaacatagaagaagcattagccccagtttgtataaaatgtctgctgcaactgaattcatgatagttcatgaaaactgaaaatcattccaattttgtaaaactgctgctactggttttatcaataaagttttagcagatggaaaaaaaaaaaaaaaaaaaaaaaaaaaaaaaaaaaaaaaaaaaaaaaaaaaaaaaaaaaaaaaaaaaaaaaaaaaaaaaaaaaaaaaaaaaaaaaaaaaaaaaaactcaaggggcaacccaatgcccattataacaaaaagaaaaaacttttaaaagccctggcgggacccaattaaaccttactggcgggaaaaccccttttttccccctgttttaatacctggcaggccttgcaaatatcgccctttccacaatttgccaacgtgacggaccaatgcctttttccaaacggttatataccctaaaggcccactggaaaaattctttccaaaaaatgtcaggttaaaaaaccgggtaaaccgaattgtgaaacacccctctttttttcacaatattgccccaaaaatttgtgataacctcgtgtgactctttcggaaccaacggggccaacttgttaaaaacttcgtcctactacggaacaagtggcccacaattggggaaccatggctttccccttttacgggcaaaatacccctttataaggacttttggcccccttcgtgacgcg

SEQ ID NO: 190 - DNA, 427 bp, Homo sapiens
ggtaagaaaagaacattttatttccagtctattacaaacagtgtctgggtttagaaacagccgacagtgaagggacaaagaggtgttcacagggagctgctgggctgtggtcagggcaggctccaggctgtgcaagaggaagccacccagggcaggggacaatgggcccaacacagccccacctccgacgcaggggctgaggcctgggccaggggaaacacaggccaagccagcctttggccctgcgaggaggttcagacaagagccagcggagctcccaccaggggcccgaggcacggcgcctctcccagtggggtcagcaggcgaggctgctctgaggacaccacctgctcccggaaccttcccacaagggcttcactggggaacagtggggcccagaacccagagaccccgcaagccacacagc

SEQ ID NO: 191 - DNA, 504 bp, Homo sapiens
ttttttttttttttttgagacgagtctcgctctgtcgccaggctggagtgcaattgtgcaatctcggctcactgcaacctccactccagcctggtgaaagagcaaggttccgtccaaaataataataataataaaataaaatattctaaaagtatgacgtcaagatggccttaaaaaaaaaagctttatggaaaactgtgacaggccatatacaaatgtgaggtattcatcacccaaagatgccatttgctgagcaactactaagcgctaggcacgtgctggatgctttgcctaaatcagtatgtcaccaccacaagaggccttccctgactaccctgttaaagtaaatccactcctctccccactcgctagttattctctcacgttccctgttttttccttcttactactccttgtaatttatgatgtttttgtgtgctttttcaatcctcttccaccagacagactattagcttgccatgaacaggagtcatgttggtgagc

SEQ ID NO: 192 - DNA, 321 bp, Homo sapiens
ttttttttgcaagaaatcataattttgctgtctcaaagaaactttataacttatttacaaagtttttttcccaagatacaaagcaataagttaacattctcaatataaaactaaactttgacattttgaacacaaaacacagttgtttttagggggtcacattttccaaatttcacaagaaaaatgtcaagattctcatttcacaaagcatggggttttacagccacacaacagaacgcaaaaaggctaagcttgtgcaacatgtttccagaacaacaataataacaataataataataacaataatatgtacagtcatta

SEQ ID NO: 193 - DNA, 469 bp, Homo sapiens
ttttttttttttttttttggagacagggtctcactctgccacccaggcgggagtgcactgccatgatcacggctcactgcaatctcaacctcctgggctctggtgatcctcccacctcagcctaccaggtagctgggactacaggcacacaccaccacacacagctaacttttgtaattttagtagagatagggttttggcacgttgcccaggctggtctggaaatcctgggctcaagtgatccgcccaccttggcgtcccaaagtgctgggattacaggtgtgatctaccgcgcccggaccacctgcacatttaaaattgtgaacctctctgtatacttcagtaacttttcaaagatttctttgacacaaagttctcagaaatcttaaagctagcatttcacaacagaaaaaaagagcttctggttcactggtgaaattttactaataaaatttaaaaacaaaaagct

SEQ ID NO: 194 - DNA, 513 bp, Homo sapiens
tttttttttttttttttttttgagatgaaaaaaaaataccatattttattgattccaggttcttgcagtaatcaaacagataaaagatcctttaatactggtgcttggacagggttttacaaaacagaaagattatgcaatacttaatatttggtaacaatttttagcacatagtaaatattttattactttgggtaataaacattctgaaaaataaattctttcattatgatataacttatgatcctcaccctaacatggctatgttctctaattactcctttgtaagtaaaatcataagtaataatagttgtaatcacaagtaatactagttttaatcataatacacacataattttgaatcctgatttttctacttaaaagtatgtaatgaccatgttactatcttgctacataattttcataatcatcatttgaaaattgtacattgtacctgatcatatggatataccataaatcacaaaccacagctataccatattatcctaggca

SEQ ID NO: 195 - DNA, 1401 bp, Homo sapiens
atgtccaccaggtccgtgtcctcgtcctcctaccgcaggatgttcggcggcccgggcaccgcgagccggccgagctccagccggagctacgtgactacgtccacccgcacctacagcctgggcagcgcgctgcgccccagcaccagccgcagcctctacgcctcgtccccgggcggcgtgtatgccacgcgctcctctgccgtgcgcctgcggagcagcgtgcccggggtgcggctcctgcaggactcggtggacttctcgctggccgacgccatcaacaccgagttcaagaacacccgcaccaacgagaaggtggagctgcaggagctgaatgaccgcttcgccaactacatcgacaaggtgcgcttcctggagcagcagaataagatcctgctggccgagctcgagcagctcaagggccaaggcaagtcgcgcctgggggacctctacgaggaggagatgcgggagctgcgccggcaggtggaccagctaaccaacgacaaagcccgcgtcgaggtggagcgcgacaacctggccgaggacatcatgcgcctccgggagaaattgcaggaggagatgcttcagagagaggaagccgaaaacaccctgcaatctttcagacaggatgttgacaatgcgtctctggcacgtcttgaccttgaacgcaaagtggaatctttgcaagaagagattgcctttttgaagaaactccacgaagaggaaatccaggagctgcaggctcagattcaggaacagcatgtccaaatcgatgtggatgtttccaagcctgacctcacggctgccctgcgtgacgtacgtcagcaatatgaaagtgtggctgccaagaacctgcaggaggcagaagaatggtacaaatccaagtttgctgacctctctgaggctgccaaccggaacaatgacgccctgcgccaggcaaagcaggagtccactgagtaccggagacaggtgcagtccctcacctgtgaagtggatgcccttaaaggaaccaatgagtccctggaacgccagatgcgtgaaatggaagagaactttgccgttgaagctgctaactaccaagacactattggccgcctgcaggatgagattcagaatatgaaggaggaaatggctcgtcaccttcgtgaataccaagacctgctcaatgttaagatggcccttgacattgagattgccacctacaggaagctgctggaaggcgaggagagcaggatttctctgcctcttccaaacttttcctccctgaacctgagggaaactaatctggattcactccctctggttgatacccactcaaaaaggacacttctgattaagacggttgaaactagagatggacaggttatcaacgaaacttctcagcatcacgatgaccttgaataa

SEQ ID NO: 196 - DNA, 5667 bp, homo sapiens
tttctccctcccctctgggatgcgaaacgcgaggttttgtaacctttcctggcaattttagattttgtgtgggatttcctgtctagaagcagatacgaagatttttaagctgtttcaagatgtttccttccaatccataattatatttttaatatattcgagccatcattaaaatcactgctttcgtgattttaattattcaaataaacacttgcattttaaagacgtctgttgattataaacgaaaggtattttggtattctcattgtggagagatgacttgttatagcaaggagtggagcataggctattgcaattttaatttcctgttttagcgtcaaatagtgtgtgttccatattgagctgttgccgctgttgctgatgtggctttatgaaagttacaaattataatactgtggtagaaacaaattcagattcagatgatgaagacaaactgcatattgtggaagaagaaagtgttacagatgcagctgactgtgaaggtgtaccagaggatgacctgccaacagaccagacagtgttaccagggaggagcagtgaaagagaagggaatgctaagaactgctgggaggatgacacaggaaaggaagggcaagaaatcctggggcctgaagctcaggcagatgaagcaggatgtacagtaaaagatgatgaatgcgagtcagatgcagaaaatgagcaaaaccatgatcctaatgttgaagagtttctacaacaacaagacactgctgtcatttttcctgaggcacctgaagaggaccagaggcagggcacaccagaagccagtggtcatgatgaaaatggaacaccagatgcattttcacaattactcacctgtccatattgtgatagaggctataaacgctttacctctctgaaagaacacattaaatatcgtcatgaaaagaatgaagataactttagttgctccctgtgcagttacacctttgcatacagaacccaacttgaacgtcacatgacatcacataaatcaggaagagatcaaagacatgtgacgcagtctgggtgtaatcgtaaattcaaatgcactgagtgtggaaaagctttcaaatacaaacatcacctaaaagagcacttaagaattcacagtggagagaagccatatgaatgcccaaactgcaagaaacgcttttcccattctggctcctatagctcacacataagcagtaagaaatgtatcagcttgatacctgtgaatgggcgaccaagaacaggactcaagacatctcagtgttcttcaccgtctctttcagcatcaccaggcagtcccacacgaccacagatacggcaaaagatagagaataaaccccttcaagaacaactttctgttaaccaaattaaaactgaacctgtggattatgaattcaaacccatagtggttgcttcaggaatcaactgttcaacccctttacaaaatggggttttcactggtggtggcccattacaggcaaccagttctcctcagggcatggtgcaagctgttgttctgccaacagttggtttggtgtctcccataagtatcaatttaagtgatattcagaatgtacttaaagtggcggtagatggtaatgtaataaggcaagtgttggagaataatcaagccaatcttgcatccaaagaacaagaaacaatcaatgcttcacccatacaacaaggtggccattctgttatttcagccatcagtcttcctttggttgatcaagatggaacaaccaaaattatcatcaactacagtcttgagcagcctagccaacttcaagttgttcctcaaaatttaaaaaaagaaaatccagtcgctacaaacagttgtaaaagtgaaaagttaccagaagatcttactgttaagtctgagaaggacaaaagctttgaagggggggtgaatgatagcacttgtcttctgtgtgatgattgtccaggagatattaatgcacttccagaattaaagcactatgacctaaagcagcctactcagcctcctccactccctgcagcagaagctgagaagcctgagtcctctgtttcatcagctactggagatggcaatttgtctcctagtcagccacctttaaagaacctcttgtctctcctaaaagcatattatgctttgaatgcacaaccaagtgcagaagagctctcaaaaattgctgattcagtaaacctaccactggatgtagtaaaaaagtggtttgaaaagatgcaagctggacagatttcagtgcagtcttctgaaccatcttctcctgaaccaggcaaagtaaatatccctgccaagaacaatgatcagcctcaatctgcaaatgcaaatgaaccccaggacagcacagtaaatctacaaagtcctttgaagatgactaactccccagttttaccagtgggatcaaccaccaatggttccagaagtagtacaccatccccatcacctctaaacctttcctcatccagaaatacacagggttacttgtacacagctgagggtgcacaagaagagccacaagtagaacctcttgatctttcactaccaaagcaacagggagaattattagaaaggtcaactatcactagtgtttaccagaacagtgtttattctgtccaggaagaacccttgaacttgtcttgcgcaaaaaaggagccacaaaaggacagttgtgttacagactcagaaccagttgtaaatgtaatcccaccaagtgccaaccccataaatatcgctatacctacagtcactgcccagttacccacaatcgtggccattgctgaccagaacagtgttccatgcttaagagcgctagctgccaataagcaaacgattctgattccccaggtggcatacacctactcaactacggtcagccctgcagtccaagaaccacccttgaaagtgatccagccaaatggaaatcaggatgaaagacaagatactagctcagaaggagtatcaaatgtagaggatcagaatgactctgattctacaccgcccaaaaagaaaatgcggaagacagaaaatggaatgtatgcttgtgatttgtgtgacaagatattccaaaagagtagttcattattgagacataaatatgaacacacaggtaaaagacctcatgagtgtggaatctgtaaaaaggcatttaaacacaaacatcatttgattgaacacatgcgattacattctggagaaaagccctatcaatgtgacaaatgtggaaagcgcttctcacactctgggtcttattctcaacacatgaatcatcgctactcctactgtaagagagaagcggaagaacgtgacagcacagagcaggaagaggcagggcctgaaatcctctcgaatgagcacgtgggtgccagggcgtctccctcacagggcgactcggacgagagagagagtttgacaagggaagaggatgaagacagtgaaaaagaggaagaggaggaggataaagagatggaagaattgcaggaagaaaaagaatgtgaaaaaccacaaggggatgaggaagaggaggaggaggaggaagaagtggaagaagaagaggtagaagaggcagagaatgagggagaagaagcaaaaactgaaggtctgatgaaggatgacagggctgaaagtcaagcaagcagcttaggacaaaaagtaggcgagagtagtgagcaagtgtctgaagaaaagacaaatgaagcctaatcgtttttctagaaggaaaataaattctaattgataatgaatttcgttcaatattatccttgcttttcatggaaacacagtaacctgtatgctgtgattcctgttcactactgtgtaaagtaaaaactaaaaaaatacaaaatacaaaacacacacacacacacacacacacacacacacacacacacaaaataaatccgggtgtgcctgaacctcagacctagtaatttttcatgcagttttcaaagttaggaacaagtttgtaacatgcagcagattagaaaaccttaatgactcagagagcaacaatacaagaggttaaaggaagctgattaattagatatgcatctggcattgttttatcttatcagtattatcactcttatgttggtttattcttaagctgtacaattgggagaaattttataattttttattggtaaacatatgctaaatccgcttcagtattttattatgttttttaaaatgtgagaacttctgcactacaaaattcccttcacagagaagtataatgtagttccaacccgtgctaactaccttttataaattcagtctagaaggtagtaatttctaatatttagatgtcttagtagagcgtattatcatttaaagtgtattgttagccttaagaaagcagctgatagaagaactgaagtttcttactcacgtggtttaaaatggagttcaaaagattgccattgagttctgattgcagggactaacaatgttaatctgataaggacagcaaaatcatcagaatcagtgtttgtgattgtgtttgaatatgtggtaacatatgaaggatatgacatgaagctttgtatctcctttggccttaagcaagacctgtgtgctgtaagtgccatttctcagtattttcaaggctctaacccgccttcatccaatgtgtggcctacaataactagcatttgttgatttgtctcttgtatcaaaattcccaaataaaacttaaaaccactgactctgtcagagaaactgaaacactgggacatttcatccttcaattcctcggtattgattttatgttgattgattttcagaatttctctacagaaacgaaagggaaattttctaatctgctttatccatgtacttgcatttcagacatggacatgctattgttatttggctcataactgtttccaaatgttagttattatggacccaatttattaacaacattagctgatttttacctatcagtattattttatttcttttagtttatagatctgtgcaacatttttgtactgtatgtcttcaaacctggcagtattaatacccttcttactgacatatgtacttttagttttagaaaacttttatatttatgtgtcttatttttatatttctttatttattacacagtgtagtgtataatactgtagtttgtattaatacaataatatattttagtatgaaaatttggaaagttgataagatttaaagtagagatgcaattggttctcctgcattgagatttgatttaacagtgttatgttaacatttatacttgccttggactgtagaacagaacttaaatgggaatgtattagttttacaactacaatcaagtcattttacctttacccagtttttaatataaaacttaaattttgaaattcactgtgtgactaatagcatgatgctctgcagttttattaagaaatcagcctaaccatacaactctcatttccttagtaagccaaattaggattaacttctataaacagtgttgggaacaatgtttaacattttgtgccaatttgttcctgtattcatgtatgtaagttacagatctgactcttcatttttaagttccttgttacatcatggtcattttctagttttttaccagactcccatctcacaataaaatgcatcaacaagaaaaaaaaaaaaaaaaa

SEQ ID NO: 197 - DNA, 5583 bp, homo sapiens
ataatctatcccagatcctttcccagagagaaacttggcgatcacgttttcacatgatgctcacgctcagggcgcttcaattatccctccccacaaagataggtggcgcgtgtttcagggtctctcgtctctctcctacagaaaagaaaaagaaaaaaatgtcattagaagaggcgtaacacgtcagtccgtccccaggtttgtgtttcctggagtggccgaaagagatcagttctaacctgctctgcaggaataacggtcctgcctcccgacactcttggcgaggtttttgtacagtttgctccgggagctgtttcttcgcttccacctttttctcccccacacttcgcggcttcttcatgctttttcttctcaccatttctggccaaaactacaaacaagacttcgcagatcgagcctgcgtgctgccgaagcagggcgccgagtccatgcgaactgccatctgatccgctcttatcaatgaagcagccgatcatggcggatggcccccggtgcaagaggcgcaaacaagccaatcccaggaggaaaaacgtggtgaactatgacaatgtagtggacacaggttctgaaacagatgaggaagacaagcttcatattgctgaggatgacggtattgccaaccctctggaccaggagacgagtccagctagtgtgcccaaccatgagtcctccccacacgtgagccaagctctgttgccaagagaggaagaggaagatgaaataagggagggtggagtggaacacccctggcacaacaacgagattctacaagcctctgtagatggtccagaagaaatgaaggaagactatgacactatggggccagaagccacgatccagaccgcaattaacaatggtacagtgaagaatgcaaattgcacatcagattttgaggaatactttgccaaaagaaaactggaggaacgcgatggtcatgcagtcagcatcgaggagtaccttcagcgcagtgacacagccattatttacccagaagcccctgaggagctgtctcgccttggcacgccagaggccaatgggcaagaagaaaatgacctgccacctggaactccagatgcttttgcccaactgctgacctgcccctactgcgaccggggctacaagcgcttgacatcactgaaggagcacatcaagtaccgccacgagaagaatgaagagaacttttcctgccctctctgtagctacacgtttgcctaccgcacccagctcgagcggcatatggtgacacacaagccagggacagatcagcaccaaatgctaacccaaggagcaggtaatcgcaagttcaaatgcacagagtgtggcaaggccttcaaatataaacaccatctgaaagaacacctgcgaattcacagtggtgaaaaaccttacgagtgcccaaactgcaagaaacgtttctcccattctggttcctacagttcgcacatcagcagcaagaaatgtattggtttaatctctgtaaatggccgaatgagaaacaatatcaagacgggttcttcccctaattctgtttcttcttctcctactaattcagccattacccagttaagaaacaagttggagaatggaaaaccacttagtatgtctgaacagacaggcttacttaaaattaaaacagaaccactagacttcaatgactataaagttcttatggctacacacgggtttagtggcactagtccctttatgaatggtgggcttggagccaccagccctttaggagttcatccatctgctcagagtccaatgcagcacttaggtgtagggatggaagcccctttacttgggtttcccaccatgaatagtaatttaagtgaggtacaaaaggttctacagattgtggacaatactgtttccaggcaaaaaatggactgcaaggctgaagaaatttcaaagttgaaaggttatcacatgaaggatccatgctctcaacctgaggaacaaggagttacttctcctaatattccgcctgtcggtcttccggtagtgagtcataatggtgccactaaaagtattattgactatacgttggaaaaagtcaatgaagccaaagcttgcctccagagcttgactactgactcaaggagacagatcagtaatataaagaaagagaagctacgtactttaatagatttggtcactgatgacaaaatgattgagaaccacaacatatccactccattttcatgccagttctgtaaagaaagttttcctggccccatccctttgcatcagcatgaacgttacctttgtaagatgaatgaagagatcaaggcggtcctgcagcctcatgaaaacatagtccccaacaaagccggagtttttgttgataataaagccctcctcttgtcatctgtactttctgagaaaggaatgacaagccccatcaacccatacaaggaccacatgtctgtactcaaagcatactatgctatgaacatggagcccaactccgatgaactgctgaaaatttccattgctgtgggccttcctcaggaatttgtgaaggaatggtttgaacaacgaaaagtctaccagtactcaaattccaggtccccatccctggaaagaagctccaagccgttagctcccaacagtaaccctcccacaaaagactctttattacccaggtctcctgtaaaacctatggactccataacatcaccatctatagcagaactccacaacagtgttacgaattgtgatcctcctctcaggctaacaaaaccttcccattttaccaatattaaaccagttgaaaaattggaccactccaggagtaatactccttctcccttaaatctttcctccacatcttctaaaaactcccacagtagttcatacactccaaacagcttctcttctgaggagctccaggctgagcctttagacttgtcattaccaaaacaaatgaaagaacccaaaagtattatagccacaaagaacaaaacaaaagctagtagcatcagtttagatcataacagtgtttcttcctcatctgaaaactcagatgagcctctgaacttgacttttatcaagaaggaattttcaaattcaaataatctggacaacaaaagcactaacccagtgttcagcatgaacccatttagtgccaaacctttatacacagctcttccacctcaaagcgcatttccccctgctactttcatgccaccagtccagaccagtattcctgggctacgaccatacccaggactggatcagatgagcttcctaccacatatggcctacacctacccaactggagcagctacttttgctgatatgcagcaaaggagaaagtaccagcggaaacaaggatttcagggagaattgcttgatggagcacaagactacatgtcaggcctagatgatatgacagactccgactcctgtctgtctcgcaaaaagatcaagaagacagagagtggcatgtatgcatgtgacttatgtgacaagacattccagaaaagcagttcccttctgcgacataaatacgaacacacaggaaaaagaccacatcagtgtcagatttgtaagaaagcgtttaaacacaagcaccaccttatcgagcactcaaggcttcactcgggcgagaagccctatcagtgtgataaatgtggcaagcgcttctcacactcgggctcgtactcgcagcacatgaatcacaggtattcctactgcaagcgggaggcggaggagcgggaagcggcggagcgcgaggcgcgcgagaaagggcacttggaacccaccgagctgctgatgaaccgggcttacttgcagagcattacccctcaggggtactctgactcggaggagagggagagtatgccgagggatggcgagagcgagaaggagcacgagaaagaaggcgaggatggctacgggaagctgggcagacaggatggcgacgaggagttcgaggaggaagaggaagaaagtgaaaataaaagtatggatacggatcccgaaacgatacgagatgaagaagagactggagatcactccatggacgatagttcggaggatgggaaaatggaaaccaaatcagaccacgaggaagacaatatggaagatggcatgtaataaactactgcattttaagcttcctatttttttttccagtagtattgttacctgcttgaaaacactgctgtgttaagctgttcatgcacgtgcctgacgcttccaggaagctgtagagagggacagaaggggcggttcagccaagacagatgtagacggagttggagctgggtattgttaaaaactgcattatgcaaaaattttgtacagtgttaaggcctaaaaactgtgtggttcagagactaattcctgtgtttaatagcatttatactttaagcacaactagaaaattgtaagaattgcactctacttatgtatcactacaaactttaaaaaactatgtctaatttatattaatacattttaaaaaggtgcccgcactaccatacatcagtatttttattattattattgttattcctttttaatttaatgtgctcgcactacaatgcatcagtattatgattcctctgtactttcctttcgctattcatcaatttcccattttttttttcagcttaagtaaccacacaattttaggcctcaatttttttttttttctgtgaaggaacttgaagtgatgcatgtgtgaatttaagataccgaagtcttaaagtgacctggacgtgaaggaaaaagtaagatgagaaataaagaaagcctttgtaaggtggttttaaaagccttatatgcaaaccttttaatctgtgtttctgcaagtgccatccttgtacagtgttaagagggtaacatgggttacctttgcaccagcttcagtgttaagctcaccctgttctttgaagcacccatgtcagtattagaagaataggcagcagttccttagtttacatatgtttgtgcaattattttctgtacttttttgttcattaattttgtcagtattacaccaaactgtttttgcaacaaaaaaattttttttgcattcatttaattttaggtcaaataacattttatttatgtggctcattttatatttcctaattttatttatttcatactgtagtgtacagtattatagttcttcaatatatagatatattttagtaaaaaaggaacatgacgttgatcatttgggcaaattttacgtaaagagaagagcatttattgtgttttggaacattaattgtgagatgggatttttcaattttattattttatttttgtttttttccaattactggaaattccaaatttgggaacttttgatacgatcttgtgaaaacactgtattttcgactgaaaattccactttcttcatcttgttttttagctaaaaagagggactgttaaatacaatgtatgataccatgacaaaaatctttcctgaattgtctttgtaaaagtattattgaattttcaatttgtaatttcttttgaaaatgaccatgctcgaataaaaatgtagccaaactaaaaaaaaaaaaaaaaaaaaaaaaa

What is claimed is:

1. A diagnostic method comprising:
a) providing a sample of cancer cells of epithelial origin from a patient to be tested;
b) detecting in the sample the expression of at least one gene chosen from a panel of genes whose expression has been correlated with sensitivity or resistance to an antibody that binds EGFR, wherein the at least one gene is chosen from one or more genes selected from the group consisting of E-cadherin, RAB25, integrin beta 6 (ITGB6), vimentin, ZEB1 and SIP1; and
c) comparing the level of expression of at least one gene detected in the patient sample to a level of expression of at least one gene that has been correlated with sensitivity or resistance to the antibody that binds EGFR.

2. The diagnostic method of claim 1, comprising detecting expression of E-cadherin.

3. The diagnostic method of claim 1, comprising detecting expression of RAB25.

4. The diagnostic method claim 1, comprising detecting expression of integrin beta 6 (ITGB6).

5. The diagnostic method of claim 1, comprising detecting expression of vimentin.

6. The diagnostic method of claim 1, comprising detecting expression of ZEB1.

7. The diagnostic method of claim 1, comprising detecting expression of SIP1.

8. The diagnostic method of claim 1, wherein the antibody is cetuximab, panitumumab, nimotuzumab, or matuzumab.

9. The diagnostic method of claim 8, wherein the antibody is cetuximab.

10. The diagnostic method of claim 8, wherein the antibody is panitumumab.

11. The diagnostic method of claim 8, wherein the antibody is nimotuzumab.

12. The diagnostic method of claim 8, wherein the antibody is matuzumab.

13. The diagnostic method of claim 1, wherein the cancer cells are selected from breast cancer cells, skin cancer cells, bladder cancer cells, colon cancer cells, prostate cancer cells, uterine cancer cells, cervical cancer cells, ovarian cancer cells, esophageal cancer cells, stomach cancer cells, gastrointestinal cancer cells, pancreatic cancer cells, laryngeal cancer cells, and lung cancer cells.

14. The diagnostic method of claim 13 where the cancer cells are from pancreatic cancer cells.

15. The diagnostic method of claim 13 where the cancer cells are from head and neck cancer cells.

16. The diagnostic method of claim 13 where the cancer cells are from breast cancer cells.

17. The diagnostic method of claim 13 where the cancer cells are from colon cancer cells.

18. The diagnostic method of claim 1 further comprising: d) selecting the patient as being predicted to benefit from therapeutic administration of the antibody that binds EGFR.

19. The diagnostic method of claim 18, wherein the expression of at least one gene in the patient's cancer cells is statistically more similar to the expression levels of at least one gene that has been correlated with sensitivity to the antibody that binds EGFR than to resistance to the antibody that binds EGFR.

20. The diagnostic method of claim 18, wherein the expression of at least one gene in the patient's cancer cells is statistically more similar to the expression levels of at least one gene that has been correlated with resistance to the antibody that binds EGFR than to resistance to the antibody that binds EGFR.

21. The diagnostic method of claim 1, wherein the panel of genes in (b) is identified by a method comprising:
a) providing a sample of cells that are sensitive or resistant to treatment with the antibody that binds EGFR;
b) detecting the expression of at least one gene in the antibody-sensitive cells as compared to the level of expression of the gene or genes in the antibody-resistant cells; and
c) identifying a gene or genes having a level of expression in the antibody-sensitive cells that is statistically significantly different than the level of expression of the gene or genes in the antibody-resistant cells.

22. The diagnostic method of claim 1, wherein expression of the gene(s) is detected by a method selected from the group of:
(i) measuring amounts of transcripts of the gene in the tumor cells;
(ii) detecting hybridization of at least a portion of the gene or a transcript thereof to a nucleic acid molecule comprising a portion of the gene or a transcript thereof in a nucleic acid array; and
(iii) detecting the production of a protein encoded by the gene.

23. A method of detecting sensitivity of an epithelial-origin cancer to an antibody the binds EGFR comprising:
a) detecting in a sample of tumor cells from a patient to be tested, the expression of one or more genes selected from the group consisting of E-cadherin, RAB25, integrin beta 6 (ITGB6), vimentin, ZEB1 and SIP1;
b) comparing the level of expression of the one or more genes detected in the patient sample to a gene expression level of E-cadherin, RAB25, integrin beta 6 (ITGB6), vimentin, ZEB1 or SIP1 that has been correlated with sensitivity or resistance to an antibody that binds EGFR; and
c) identifying the expression level of the one or more genes detected in the patient sample that are statistically more similar to the expression level of E-cadherin, RAB25, integrin beta 6 (ITGB6), vimentin, ZEB1 or SIP1 that has been correlated with sensitivity than to the expression levels that have been correlated with resistance.

24. The method of claim 23 wherein the gene is E-cadherin.

25. The method of claim 23 where the gene is RAB25.

26. The method of claim 23 where the gene is integrin beta 6 (ITGB6).

27. The method of claim 23 wherein the gene is vimentin.

28. The method of claim 23 wherein the gene is ZEB1.

29. The method of claim 23 wherein the gene is SIP1.

30. The method of claim 23 wherein the antibody is cetuximab, panitumumab, nimotuzumab or matuzumab.

31. The method of claim 30 wherein the antibody is cetuximab.

32. The method of claim 30 wherein the antibody is panitumumab.

33. The method of claim 30 wherein the antibody is nimotuzumab.

34. The method of claim 30 wherein the antibody is matuzumab.

35. The method of claim 23 wherein the cancer is breast cancer, skin cancer, bladder cancer, pancreatic cancer, colon cancer, gastro-intestinal cancer, prostate cancer, uterine cancer, cervical cancer, ovarian cancer, esophageal cancer, stomach cancer, head and neck cancer, laryngeal cancer, or lung cancer.

36. The method of claim 35 where the cancer is breast cancer.

37. The method of claim 35, where the cancer is colon cancer.

38. The method of claim 35, where the cancer is pancreatic cancer.

39. The method of claim 35, where the cancer is head and neck cancer.

40. A kit comprising reagents for the detection of expression levels that have been correlated with sensitivity or resistance to an EGFR inhibitor of one or more genes selected from E-cadherin, RAB25, integrin beta 6, vimentin, ZEB1 and SIP1 in a sample of cancer cells.

41. The kit of claim 40, further comprising a compilation comprising E-cadherin, RAB25, integrin beta 6, vimentin, ZEB1 or SIP1 expression levels that have been correlated with sensitivity or resistance to an EGFR inhibitor.

42. The kit of claim 41 wherein the gene is E-cadherin.

43. The kit of claim 41 wherein the gene is ZEB1.

44. The kit of claim 41 wherein the gene is SIP1.

45. The kit of claim 41 wherein the gene is RAB25.

46. The kit of claim 41 wherein the gene is integrin beta 6.

47. The kit of claim 41 wherein the gene is vimentin.

48. A method of treating cancer in a patient comprising:
a) detecting the expression levels of one or more genes selected from E-cadherin, RAB25, integrin beta 6, vimentin, ZEB1 and SIP1; and
b) administering an EGFR inhibitor.

49. The method of claim 48, wherein the gene is E-cadherin.

50. The method of claim 48, wherein the gene is RAB25.

51. The method of claim 48, wherein the gene is integrin beta 6.

52. The method of claim 48, wherein the gene is vimetin.

53. The method of claim 48, wherein the gene is ZEB1.

54. The method of claim 48, wherein the gene is SIP1.

55. The method of claim 48, wherein the EGFR inhibitor is selected from gefitinib, erlotinib, imatinib, lapatinib, and semazinib.

56. The method of claim 55, wherein the EGFR inhibitor is gefitinib.

57. The method of claim 55, wherein the EGFR inhibitor is erlotinib.

58. The method of claim 55, wherein the EGFR inhibitor is imatinib.

59. The method of claim 55, wherein the EGFR inhibitor is lapatinib.

60. The method of claim 55, wherein the EGFR inhibitor is semazinib.

61. The method of claim 48, wherein the EGFR inhibitor is selected from cetuximab, panitumumab, nimotuzumab, and metuzumab.

62. The method of claim 61, wherein the EGFR inhibitor is cetuximab.

63. The method of claim 61, wherein the EGFR inhibitor is panitumumab.

64. The method of claim 61, wherein the EGFR inhibitor is nimotuzumab.

65. The method of claim 61, wherein the EGFR inhibitor is metuzumab.

66. A method of treating cancer in a patient comprising:
a) upregulating E-cadherin in a cancer cell by administering to the patient at least one ZEB1 inhibitor; and
b) administering to the patient an EGFR inhibitor.

67. A method of treating cancer in a patient comprising:
a) upregulating E-cadherin in a cancer cell by administering to the patient at least one SIP1 inhibitor; and
b) administering to the patient an EGFR inhibitor.

68. The diagnostic method of claim 1 wherein the at least one gene or genes comprises one or more genes selected from the group consisting of E-cadherin (SEQ ID NO: 3), RAB25 (SEQ ID NO: 83), integrin beta 6 (ITGB6) (SEQ ID NO: 137), integrin beta 6 (ITGB6) (SEQ ID NO: 52), ZEB1 (SEQ ID NO:196), SIP1 (SEQ ID NO: 197), and vimentin (SEQ ID NO: 195).

69. The diagnostic method of claim 68, comprising detecting the expression of E-cadherin (SEQ ID NO: 3).

70. The diagnostic method of claim 68, comprising detecting the expression of RAB25 (SEQ ID NO: 83).

71. The diagnostic method of claim 68, comprising detecting the expression of integrin beta 6 (ITGB6) (SEQ ID NO: 137).

72. The diagnostic method of claim 68, comprising detecting the expression of integrin beta 6 (ITGB6) (SEQ ID NO: 52).

73. The diagnostic method of claim 68, comprising detecting the expression of vimentin (SEQ ID NO: 195).

74. The method of claim 23 wherein the one or more genes is selected from the group consisting of E-cadherin (SEQ ID NO: 3), RAB25 (SEQ ID NO: 83), integrin beta 6 (ITGB6) (SEQ ID NO: 137), integrin beta 6 (ITGB6) (SEQ ID NO: 52), ZEB1 (SEQ ID NO: 196), SIP1 (SEQ ID NO: 197), and vimentin (SEQ ID NO: 195).

75. The diagnostic method of claim 74, comprising detecting the expression of E-cadherin (SEQ ID NO: 3).

76. The diagnostic method of claim 74, comprising detecting the expression of RAB25 (SEQ ID NO: 83).

77. The diagnostic method of claim 74, comprising detecting the expression of integrin beta 6 (ITGB6) (SEQ ID NO: 137).

78. The diagnostic method of claim 74, comprising detecting the expression of integrin beta 6 (ITGB6) (SEQ ID NO: 52).

79. The diagnostic method of claim 74, comprising detecting the expression of vimentin (SEQ ID NO: 195).

80. The kit of claim 40, wherein the one or more genes is selected from E-cadherin (SEQ ID NO: 3), RAB25 (SEQ ID NO: 83), integrin beta 6 (ITGB6) (SEQ ID NO: 137), integrin beta 6 (ITGB6) (SEQ ID NO: 52), ZEB1 (SEQ ID NO:196), SIP1 (SEQ ID NO: 197), and vimentin (SEQ ID NO: 195).

81. The kit of claim 80, wherein the gene is E-cadherin (SEQ ID NO: 3).

82. The kit of claim 80, wherein the gene is RAB25 (SEQ ID NO: 83).

83. The kit of claim 80, wherein the gene is integrin beta 6 (ITGB6) (SEQ ID NO: 137).

84. The kit of claim 80, wherein the gene is integrin beta 6 (ITGB6) (SEQ ID NO: 52).

85. The kit of claim 80, wherein the gene is vimentin (SEQ ID NO: 195).

86. The method of claim 48, wherein the one or more genes is selected from E-cadherin (SEQ ID NO: 3), RAB25 (SEQ ID NO: 83), integrin beta 6 (ITGB6) (SEQ ID NO: 137), integrin beta 6 (ITGB6) (SEQ ID NO: 52), ZEB1 (SEQ ID NO: 196), SIP1 (SEQ ID NO: 197), and vimentin (SEQ ID NO: 195).

87. The method of claim 86, wherein the gene is E-cadherin (SEQ ID NO: 3).

88. The method of claim 86, wherein the gene is RAB25 (SEQ ID NO: 83).

89. The method of claim 86, wherein the gene is integrin beta 6 (ITGB6) (SEQ ID NO: 137).

90. The method of claim 86, wherein the gene is integrin beta 6 (ITGB6) (SEQ ID NO: 52).

91. The method of claim 86, wherein the gene is vimentin (SEQ ID NO: 195).

92. The method of claim 68, wherein the gene is ZEB1 (SEQ ID NO: 196).

93. The method of claim 68, wherein the gene is SIP1 (SEQ ID NO: 197).
